(19) United States
(12) Patent Application Publication
(10) Pub. No.: US 2011/0028695 A1
(43) Pub. Date: Feb. 3, 2011

(54) METHOD FOR OBTAINING POLYPEPTIDE CONSTRUCTS COMPRISING TWO OR MORE SINGLE DOMAIN ANTIBODIES

(76) Inventors: Hilde Adi Pierrette Revets, Meise (BE); Hendricus Renerus Jacobus Mattheusq Hoogenboom, Maastricht (NL)

Correspondence Address: WOLF GREENFIELD & SACKS, P.C., 600 ATLANTIC AVENUE, BOSTON, MA, 02210-2206, US

(21) Appl. No.: 12/744,970

(22) PCT Filed: Nov. 28, 2008
(86) PCT No.: PCT/EP08/66369

§ 371 Date: Oct. 19, 2010

(30) Foreign Application Priority Data
Nov. 27, 2007 (US) 61/004332
Dec. 4, 2007 (US) 61/005265
Dec. 4, 2007 (US) 61/005324
Dec. 4, 2007 (US) 61/005331

(51) Int. Cl. C40B 30/00; C07K 16/46

(52) U.S. Cl. 530/387.3; 506/7

(57) ABSTRACT

The present invention relates to methods for obtaining a polypeptide construct directed against one or more antigens and/or epitopes and having one or more desired characteristics, wherein the polypeptide construct comprises at least two single domain antibodies. The methods of the present invention involve producing a diversity of polypeptide constructs that are structural variants and screening the produced diversity of polypeptide constructs for a polypeptide construct having said one or more desired characteristics. The present invention further relates to polypeptide constructs directed against one or more antigens and/or epitopes having one or more desired characteristics, wherein the polypeptide construct comprises at least two single domain antibodies. The methods and polypeptide constructs according to the present invention are useful for the identification of optimal therapeutic compounds.

### FIELD OF THE INVENTION

[0001] The present invention relates to the area of antibody engineering and in particular concerns a method for obtaining polypeptide constructs directed against one or more antigens and/or epitopes, said polypeptide constructs having one or more desired characteristics.

### BACKGROUND OF THE INVENTION

[0002] Antibody constructs comprising more than one binding site and/or binding unit are known to have several advantages compared to antibodies and antibody fragments comprising only one single binding site, such as an improved potency, bi- or multispecificity, multifunctionality, etc.

[0003] Typically, individual binding units are first isolated and extensively characterized, prior to composing an antibody construct combining these binding units. The method of linking the binding units by means of linker sequences, the composition of these linker sequences and the orientation and order of the binding units, as well as the choice of the binding unit combination itself all can affect the specific characteristics of the antibody construct, such as for example the affinity and/or avidity for one or more antigens, the expression levels and/or the stability of the antibody construct, etc. For instance, although some binding units may function very well individually, their binding behavior may be impaired upon linkage to another binding unit and/or component. Alternatively, some binding units may perform suboptimally when tested in their individual form but could nevertheless make suitable linkage partners in the context of a particular antibody construct, e.g. their characteristics may be complementary to those of other binding units and/or components.

[0004] McGuinness et al. (Nature Biotechnology 14: 1149-1154 (1996)) developed a method that allows the generation and screening of repertoires of bispecific antibody constructs, called “diabodies”. Although these diabody libraries allow screening for the optimal bispecific molecule with regard to particularly desired properties, such as binding affinity or epitope recognition, this known production method is hampered by its complex and laborious cloning procedures.

[0005] The published international applications WO 03/002609, WO 04/003019, WO 04/058821 and WO 08/096,158 disclose methods for producing dual-specific ligands by screening libraries of heavy and light chain variable domains derived from conventional four chain antibodies for a particular heavy chain variable domain and a particular light chain variable domain and subsequently combining these to form a dual-specific ligand. It is furthermore described in these applications that optionally libraries of structural and/or functional variants of the obtained dual-specific ligand can be produced in order to select the most optimal dual-specific ligand.

[0006] However, the potential of the methods described in the prior art is limited since only libraries composed of bivalent and/or bispecific fragments can be produced (i.e. precluding the possibility to produce libraries composed of more complex antibody constructs with multivalency and/or multispecificity). In addition, the format of antibody constructs present in the libraries of the prior art is less suitable for the production of biparatopic molecules (i.e. antibody constructs comprising at least two binding units that bind to two different epitopes on the same antigen). Finally, it is noted that the antibody construct libraries of the prior art are produced at random and therefore are characterized by the presence of quite a lot of unfavorable combinations, which hampers screening for the optimal bispecific molecule.

### SUMMARY OF THE INVENTION

[0007] The present invention provides rapid and efficient methods for obtaining a polypeptide construct, which methods overcome the drawbacks and limitations of the methods described in the prior art. By using the smallest antigen binding antibody fragments (i.e. single domain antibodies) as basic building blocks for the production of polypeptide constructs, the methods of the invention allow to easily and rapidly prepare and screen large numbers of multivalent, multispecific and/or multiparatopic polypeptide constructs in order to obtain a particular polypeptide construct having specific desired characteristics. The system bypasses the need to first extensively characterize the individual binding units, by testing the performance of these binding units directly in the context of a particular polypeptide construct, potentially revealing functional features not exhibited by the individual binding units.

[0008] The invention provides methods wherein a template polypeptide construct is selected, a diversity of structural variants for the template are generated, and the diversity of constructs is screened for a polypeptide construct having one or more suitable characteristics, more particularly having two or more suitable characteristics.

[0009] Thus, according to one aspect, the present invention relates to methods for obtaining a polypeptide construct having one or more desired characteristics, wherein the polypeptide construct comprises at least two single domain antibodies and is directed against one or more antigens and/or epitopes, which methods at least comprise the steps of:
[0010] (i) selecting a template polypeptide construct
[0011] (ii) producing a diversity of polypeptide constructs that are structural variants for the selected template polypeptide construct of step (i), wherein said structural variants each comprise at least two single domain antibodies, and
[0012] (iii) screening the produced diversity of polypeptide constructs of step (ii) for a polypeptide construct having said one or more desired characteristics, wherein said polypeptide construct comprises at least two single domain antibodies and is directed against one or more antigens and/or epitopes.

[0013] In particular embodiments, the polypeptide constructs obtained according to the methods of the invention comprising at least two single domain antibodies comprise at least two single domain antibodies selected from domain antibodies, “dAbs”, Nanobodies®, V_{HH} sequences and other single variable domains including combinations thereof. For instance, particular embodiments of the methods of the invention comprise the production of polypeptide constructs wherein the at least two single domain antibodies are selected from V_{H} domains and/or V_{L} domains (both derived from conventional four-chain antibodies) and/or V_{HH} domains (derived from heavy chain antibodies). More particular embodiments of the invention relate to the production of polypeptide constructs wherein the single domain antibodies consist essentially of only one type of domain antibody (i.e. corresponding to either heavy or light chain domains). Most particularly it is envisaged that the methods of the present invention involve the generation of polypeptide constructs wherein the single domains exclusively consist of heavy chain domain antibodies (e.g. V_{H} or V_{HH}). Further particular embodiments of the invention involve methods wherein the polypeptide constructs generated comprise at least two single domains, whereby the single domains of the construct consist exclusively of V_{HH} domains or exclusively consist of heavy chain variable domains derived from heavy chain antibodies.

[0014] In a particular embodiment of the invention, the diversity of polypeptide constructs can be a set, collection or library of polypeptide constructs. More particularly, the diversity of polypeptide constructs can be a library of polypeptide constructs.

[0015] Also, the diversity of polypeptide constructs may be a set, collection or library of polypeptide constructs comprising at least two single domain antibodies that are exclusively heavy chain variable domains (e.g. V_{H} or V_{HH}). More particularly, the diversity of polypeptide constructs may be a set, collection or library of polypeptide constructs comprising at least two single domain antibodies that are exclusively heavy chain variable domains of heavy chain antibodies (V_{HH} domains).

[0016] In further particular embodiments, step (ii) of the methods of the invention of producing a diversity of polypeptide constructs that are structural variants for the selected template polypeptide construct of step (i), comprises producing one or more of the following:
[0017] structural variants with regard to the number and/or identity of said single domain antibodies in said polypeptide constructs, and/or,
[0018] structural variants with regard to the relative position of said single domain antibodies within the polypeptide constructs, and/or,
[0019] structural variants with regard to the amino acid residues of the CDR regions of said single domain antibodies in said polypeptide constructs, and/or,
[0020] structural variants with regard to the amino acid residues of the framework regions of said single domain antibodies in said polypeptide constructs, and/or,
[0021] structural variants with regard to the codon usage of said selected template polypeptide construct.

[0022] It is envisaged that, in the methods of the invention the selected template polypeptide construct can a theoretical polypeptide construct, for which in the methods described herein a diversity of polypeptide constructs are generated which are structural variants. This is typically the case when the starting point is only a desired feature (e.g. antigen binding). Alternatively, the selected polypeptide construct comprises a known (i.e. previously identified single domain antibody) and the diversity of polypeptide constructs comprises structural variants of the template polypeptide construct.

[0023] In particular embodiments, said step (ii) of the methods of the invention of producing a diversity of polypeptide constructs that are structural variants for the selected template polypeptide construct of step (i) comprises producing structural variants each comprising at least two single domain antibodies that are linked via one or more peptide linkers. In particular embodiments, modifying the peptide linkers may favorably affect one or more desirable characteristics of the polypeptide construct.

[0024] Accordingly, in further particular embodiments of the methods described herein, step (ii) of the methods of the invention of producing a diversity of polypeptide constructs that are structural variants for the selected template polypeptide construct of step (i), wherein said structural variants each comprise at least two single domain antibodies that are linked via one or more peptide linkers, comprises producing one or more of the following
[0025] structural variants with regard to the composition of said one or more peptide linkers, and/or,
[0026] structural variants with regard to the number of said one or more linkers, and/or,
[0027] structural variants with regard to the relative position of said one or more linkers in said polypeptide constructs.

[0028] Again, as described above, the template polypeptide construct may be a theoretical construct. Alternatively, the template polypeptide construct comprises a known linker.

[0029] It will be understood to the skilled person that methods are equally envisaged wherein, upon generating a diversity of polypeptide constructs, structural variants with regard to both the single variable domains and the peptide linkers are also envisaged.

[0030] The methods of the present invention further comprise step (iii) of screening the diversity of polypeptide constructs produced in step (ii) for a polypeptide construct having one or more desired characteristics. In particular embodiments, the one or more desired characteristics may be selected from characteristics such as (but not limited to) a suitable binding affinity, a suitable solubility, a suitable stability, a suitable efficacy, and/or a suitable potency. It will be understood to the skilled person that, in the selection of the template polypeptide construct, particular characteristics may be implied (such as binding to the antigen of interest) and the screening step encompasses screening for one or more additional characteristics.

[0031] The methods of the present invention, involve the identification of polypeptide constructs which comprise at least two single domain antibodies. In particular embodiments, the methods envisage the generation of polypeptide constructs directed against one antigen. In these methods, the generated polypeptide constructs may comprise two or more single domain antibodies directed against the same epitope or directed against at least two different epitopes of the same antigen. In yet further embodiments, the methods according to this embodiment may involve the generation of polypeptide constructs comprising two or more single domain antibodies directed against different antigens. In particular embodiments of the methods described herein, the diversity of polypeptide constructs and the selected polypeptide construct comprise for instance at least three single domain antibodies, wherein the at least three single domain antibodies may be directed against the same or one or more (two or all three) different epitopes, which may be present on the same antigen or which may be present on different antigens (such as e.g. two single domain antibodies directed against the same epitope and one single domain antibody directed against a different epitope on the same antigen, two single domain antibodies directed against the same epitope on a first antigen and one single domain antibody against a different antigen; two single domain antibodies directed against a different epitope on the first same antigen and one single domain antibody against a different antigen; three single domain antibodies each directed against a different epitope on the same antigen; three single domain antibodies each directed against a different antigen).

### DETAILED DESCRIPTION OF THE INVENTION

[0032] Unless otherwise defined, all terms used in disclosing the invention, including technical and scientific terms, have the meaning as commonly understood by one of ordinary skill in the art to which this invention belongs. By means of further guidance, term definitions are included to better appreciate the teaching of the present invention. Reference is for example made to the standard handbooks, such as Sambrook et al., “Molecular Cloning: A Laboratory Manual” (2nd. Ed.), Vols. 1-3, Cold Spring Harbor Laboratory Press (1989); F. Ausubel et al, eds., “Current protocols in molecular biology”, Green Publishing and Wiley Interscience, New York (1987); Lewin, “Genes II”, John Wiley & Sons, New York, N.Y., (1985); Old et al., “Principles of Gene Manipulation: An Introduction to Genetic Engineering”, 2nd edition, University of California Press, Berkeley, Calif. (1981); Roitt et al., “Immunology” (6th. Ed.), Mosby/Elsevier, Edinburgh (2001); Roitt et al., Roitt's Essential Immunology, 10^{th} Ed. Blackwell Publishing, UK (2001); and Janeway et al., “Immunobiology” (6th Ed.), Garland Science Publishing/Churchill Livingstone, New York (2005), as well as to the general background art cited herein.

[0033] As used herein, the singular forms “a”, “an”, and “the” include both singular and plural referents unless the context clearly dictates otherwise.

[0034] The terms “comprising”, “comprises” and “comprised of” as used herein are synonymous with “including”, “includes” or “containing”, “contains”, and are inclusive or open-ended and do not exclude additional, non-recited members, elements or method steps.

[0035] The recitation of numerical ranges by endpoints includes all numbers and fractions subsumed within the respective ranges, as well as the recited endpoints.

[0036] With the term “polypeptide construct” as used herein is meant a compound or polypeptide comprising one or more (preferably at least two) binding units that are linked to each other (optionally via linker sequences such as a peptide linker sequence) and/or optionally to other groups, residues, moieties or binding units (e.g. via disulphide bridges or via linker sequences, such as peptide linker sequences). Preferably, said one or more other groups, residues, moieties or binding units are amino acid sequences.

[0037] In the context of the present invention, the polypeptide construct (also referred to as “polypeptide construct of the invention”) comprises at least two single domain antibodies (as defined herein), being directed against one or more antigens (as defined herein) and/or epitopes (as defined herein). In the method of the present invention polypeptide constructs are screened, selected and/or obtained that exhibit one or more desired characteristics. The one or more desired characteristics may be (but are not limited to) a suitable binding affinity (as described herein), a suitable solubility (as described herein), a suitable stability (as described herein), a suitable efficacy (as described herein) and/or a suitable potency (as described herein). A polypeptide construct of the invention with one or more desired characteristics is obtained using the method of the present invention by screening a diversity of polypeptide constructs for said one or more desired characteristics.

[0038] The polypeptide construct of the invention comprising two or more single domain antibodies are also be referred to herein as “multivalent” polypeptide constructs of the invention. Single domain antibodies present in such polypeptide constructs will also be referred to herein as being in a “multivalent format”. For example a “bivalent” polypeptide construct of the invention comprises two single domain antibodies, optionally linked via a linker sequence, whereas a “trivalent” polypeptide of the invention comprises three single domain antibodies, optionally linked via two linker sequences; etc.;

[0039] In a multivalent polypeptide of the invention, the two or more single domain antibodies may be the same or different, and may be directed against the same antigen or antigenic determinant (for example against the same part(s) or epitope(s) or against different parts or epitopes) or may alternatively be directed against different antigens or antigenic determinants; or any suitable combination thereof. For example, a bivalent polypeptide construct of the invention may comprise (a) two identical single domain antibodies; (b) a first single domain antibody directed against a first antigenic determinant of a protein or antigen and a second single domain antibody directed against the same antigenic determinant of said protein or antigen which is different from the first single domain antibody; (c) a first single domain antibody directed against a first antigenic determinant of a protein or antigen and a second single domain antibody directed against another antigenic determinant of said protein or antigen; or (d) a first single domain antibody directed against a first protein or antigen and a second single domain antibody directed against a second protein or antigen (i.e. different from said first antigen). Similarly, a trivalent polypeptide construct of the invention may, for example and without being limited thereto. comprise (a) three identical single domain antibody; (b) two identical single domain antibody against a first antigenic determinant of an antigen and a third single domain antibody directed against a different antigenic determinant of the same antigen; (c) two identical single domain antibody against a first antigenic determinant of an antigen and a third single domain antibody directed against a second antigen different from said first antigen; (d) a first single domain antibody directed against a first antigenic determinant of an antigen, a second single domain antibody directed against a second antigenic determinant of said antigen and a third single domain antibody directed against a third antigenic determinant of the same antigen; (e) a first single domain antibody directed against a first antigenic determinant of a first antigen, a second single domain antibody directed against a second antigenic determinant of said first antigen and a third single domain antibody directed against a second antigen different from said first antigen; or (f) a first single domain antibody directed against a first antigen, a second single domain antibody directed against a second antigen different from said first antigen, and a third single domain antibody directed against a third antigen different from said first and second antigen.

[0040] Polypeptide constructs of the invention that contain at least two single domain antibody, in which at least one single domain antibody is directed against a first antigenic determinant on an antigen and at least one single domain antibody is directed against a second antigenic determinant on the same antigen will also be referred to as “multiparatopic” polypeptide constructs of the invention, and the single domain antibody present in such polypeptide construct will also be referred to herein as being in a “multiparatopic format”. Thus, for example, a “biparatopic” polypeptide construct of the invention is a polypeptide construct that comprises at least one single domain antibody directed against a first antigenic determinant on an antigen and at least one further single domain antibody directed against a second antigenic determinant on the same antigen, whereas a “triparatopic” polypeptide construct of the invention is a polypeptide construct that comprises at least one single domain antibody directed against a first antigenic determinant on an antigen, at least one further Nanobody directed against a second antigenic determinant on the same antigen and at least one further Nanobody directed against a third antigenic determinant on the same antigen; etc.

[0041] Accordingly, in its simplest form, a biparatopic polypeptide construct of the invention is a bivalent polypeptide construct of the invention (as defined herein), comprising a first single domain antibody directed against a first antigenic determinant on the antigen, and a second single domain antibody directed against a second antigenic determinant on the same antigen, in which said first and second single domain antibody may optionally be linked via a linker sequence (as defined herein); whereas a triparatopic polypeptide of the invention in its simplest form is a trivalent polypeptide of the invention (as defined herein), comprising a first single domain antibody directed against a first antigenic determinant on the antigen, a second single domain antibody directed against a second antigenic determinant on the same antigen and a third single domain antibody directed against a third antigenic determinant on the same antigen, in which said first, second and third single domain antibody may optionally be linked via one or more, and in particular one and more, in particular two, linker sequences.

[0042] Polypeptide constructs of the invention that contain at least two single domain antibody, in which at least one single domain antibody is directed against a first antigen and at least one single domain antibody is directed against a second antigen (different from the first antigen), will also be referred to as “multispecific” polypeptides of the invention, and the single domain antibody present in such polypeptide constructs will also be referred to herein as being in a “multispecific format”. Thus, for example, a “bispecific” polypeptide construct of the invention is a polypeptide construct that comprises at least one single domain antibody directed against a first antigen and at least one further single domain antibody directed against a second antigen (i.e. different from the first antigen), whereas a “trispecific” polypeptide of the invention is a polypeptide that comprises at least one single domain antibody directed against a first antigen, at least one further single domain antibody directed against a second antigen (i.e. different from the first antigen) and at least one further single domain antibody directed against a third antigen (i.e. different from both the first and the second antigen); etc.

[0043] Accordingly, in its simplest form, a bispecific polypeptide of the invention is a bivalent polypeptide of the invention (as defined herein), comprising a first single domain antibody directed against a first antigen, and a second single domain antibody directed against a second antigen, in which said first and second single domain antibody may optionally be linked via a linker sequence (as defined herein); whereas a trispecific polypeptide of the invention in its simplest form is a trivalent polypeptide of the invention (as defined herein), comprising a first single domain antibody directed against a first antigen, a second single domain antibody directed against a second antigen and a third single domain antibody directed against a third antigen, in which said first, second and third single domain antibody may optionally be linked via one or more, and in particular one and more, in particular two, linker sequences.

[0044] For multivalent and multi specific polypeptides containing one or more V_{HH} domains and their preparation, reference is also made to Conrath et al., J. Biol. Chem., Vol. 276, 10. 7346-7350, 2001; Muyldermans, Reviews in Molecular Biotechnology 74 (2001), 277-302; as well as to for example WO 96/34103 and WO 99/23221. Some other examples of some specific multispecific and/or multivalent polypeptide of the invention can be found in the applications by Ablynx N.V. referred to herein.

[0045] A “binding unit” as used herein refers to an amino acid sequence capable of binding an epitope. In the context of the present invention, a binding unit essentially consists of a single domain antibody (as defined herein).

[0046] The term “single domain antibody” as used herein refers to a binding sequence comprising an amino acid sequence that is suitable for use as a domain antibody and includes but is not limited to a “dAb” (or an amino acid sequence that is suitable for use as a dAb) or a Nanobody® (as described herein, and including but not limited to a V_{HH} sequence), other single variable domains such V_{H} or V_{L}, or a suitable fragment of any one thereof.

[0047] The term “template polypeptide construct” as used herein refers to a theoretical or physically existing polypeptide construct, which is used as a starting point for producing a diversity of polypeptide constructs comprising at least two single domain antibodies that are structural variants for the template polypeptide construct.

[0048] The term “identified single domain antibody” as used herein refers to a single domain antibody, which as been generated previously (before the method of the present invention is applied). In most cases, the “identified single domain antibody” has a specified amino acid sequence and/or a specified antigen and/or epitope specificity.

[0049] The term “diversity” as used herein and particularly in the context of a diversity of polypeptide constructs refers to a set, group, collection or library of polypeptide constructs which may contain any suitable number of sequences, such as 1, 2, 3 or about 5, 10, 50, 100, 500, 1000, 5000, 10⁴, 10⁵, 10⁶, 10⁷, 10⁸ or more sequences. Depending on the one or more desired characteristics of the polypeptide construct that one would like to obtaine with the method of the invention, the skilled person can assess what the preferred number of sequences in the diversity of polypeptide construct. The preferred number of sequences in the diversity of polypeptide constructs may be about 5, about 10, about 50, about 100, or more than 1000, more than 10⁴, or more.

[0050] The term “antigen(s)” refers to the target molecule(s) recognized by the antigen-binding unit and more in particular by the antigen-binding site of said antigen-binding unit.

[0051] The term “epitope(s)” refers to the particular site on the antigen recognized by the antigen-binding unit (such as a binding unit essentially consisting of a (single) domain antibody or a polypeptide construct of the invention) and more in particular by the antigen-binding site of said antigen-binding unit, and can also be referred to as the “antigenic determinant(s)”. Accordingly, the terms “epitope(s)” and “antigenic determinant(s)” may be used interchangeably herein.

[0052] A binding unit, such as a single domain antibody or a polypeptide construct (or a fragment thereof), that can (specifically) bind to, that has affinity for and/or that has specificity for a specific antigenic determinant, epitope, antigen or protein (or for at least one part, fragment or epitope thereof) is said to be “against” or “directed against” said antigenic determinant, epitope, antigen or protein.

[0053] In respect of a target or antigen, the term “interaction site” on the target or antigen means a site, epitope, antigenic determinant, part, domain or stretch of amino acid residues on the target or antigen that is a site for binding to a ligand, receptor or other binding partner, a catalytic site, a cleavage site, a site for allosteric interaction, a site involved in multimerisation (such as homomerization or heterodimerization) of the target or antigen; or any other site, epitope, antigenic determinant, part, domain or stretch of amino acid residues on the target or antigen that is involved in a biological action or mechanism of the target or antigen. More generally, an “interaction site” can be any site, epitope, antigenic determinant, part, domain or stretch of amino acid residues on the target or antigen to which a polypeptide construct of the invention can bind such that the target or antigen (and/or any pathway, interaction, signalling, biological mechanism or biological effect in which the target or antigen is involved) is modulated.

[0054] The term “specificity” refers to the number of different types of antigens or antigenic determinants to which a particular antigen-binding molecule (such as a binding unit, e.g. a single domain antibody, or a polypeptide construct of the invention) can bind. The specificity of an antigen-binding molecule can be determined based on affinity and/or avidity.

[0055] All documents cited in the present specification are hereby incorporated by reference in their entirety.

[0056] The Figures, Sequence Listing and the Experimental Part/Examples are only given to further illustrate the invention and should not be interpreted or construed as limiting the scope of the invention and/or of the appended claims in any way, unless explicitly indicated otherwise herein.

[0057] In a first aspect, the invention provides methods for obtaining polypeptide constructs directed against one or more antigens or epitopes. Such methods are based on the observation that single domain antibodies (as defined herein) can appropriately be used as building blocks in the generation of a diversity of polypeptide constructs, from which suitable polypeptide constructs having one or more desired characteristics can be obtained.

[0058] As will be clear from the further description herein, the invention involves the use of binding units essentially consisting of single domain antibodies as “building blocks” to form polypeptide constructs (such as, but without limitation, the bi- or multiparatopic, the bi- or multivalent and/or the bi- or multispecific polypeptide constructs of the invention described herein), i.e. by suitably combining them with other groups, residues, moieties or binding units, such that the formed polypeptide constructs of the present invention may exhibit one or more desired characteristics or biological functions.

[0059] It is envisaged that in the polypeptide constructs of the invention, single domain antibodies can be linked to each other and/or optionally to other groups, residues, moieties or binding units (e.g. via disulphide bridges or via linker sequences, such as peptide linker sequences). Preferably, such one or more other groups, residues, moieties or binding units are amino acid sequences. As will become clear to the skilled person from the further disclosure herein, such further groups, residues, moieties may or may not provide further functionality to the polypeptide constructs of the invention and may or may not modify the properties of the polypeptide constructs of the invention. In the polypeptide constructs of the invention, the one or more amino acid sequences of the invention and the one or more groups, residues, moieties or binding units may be linked directly to each other and/or via one or more suitable linkers or spacers. For example, when the one or more groups, residues, or moieties are amino acid sequences, the linkers may also be amino acid sequences, so that the resulting polypeptide construct is a fusion (protein) or fusion (polypeptide).

[0060] In particular, the invention provides methods for obtaining polypeptide constructs having one or more, more particularly two or more desired characteristics, wherein the polypeptide constructs comprise at least two single domain antibodies and are directed against one or more antigens or epitopes, which methods comprise at least the steps of: (i) selecting a template polypeptide construct, (ii) producing a diversity of polypeptide constructs that are structural variants for the selected template polypeptide construct, wherein said structural variants each comprise at least two single domain antibodies, and (iii) screening the produced diversity of polypeptide constructs for polypeptide constructs having the one or more, more particularly two or more desired characteristics, wherein the polypeptide constructs comprise at least two single domain antibodies and are directed against one or more antigens and/or epitopes.

[0061] The step of selecting a template polypeptide construct may also involve determining a theoretical template, e.g. “a polypeptide construct capable of binding to a certain antigen X of interest”. The selection of a theoretical template implies that there are no particular structural requirements or preferences for the polypeptide construct with the desired characteristics that one would like to obtain from the methods of the invention and/or that no template polypeptide construct is available as a starting point for generating the diversity of polypeptide constructs.

[0062] Alternatively, the step of selecting a template antibody may involve selecting a physically existing (i.e. previously generated) polypeptide construct comprising at least one single domain antibody. In particular embodiments, the physically existing polypeptide construct is directed against the antigen or epitope of interest and the methods of the invention comprise the generation of a diversity of polypeptide constructs which comprises structural variants of the template polypeptide construct (as described herein below) from which a polypeptide construct can be selected according to the methods of the invention having particular (additional) suitable and/or desired characteristics, more particularly in addition to the feature of binding to the antigen of interest. In alternative embodiments, the template polypeptide construct is a physically existing polypeptide construct directed against one or more antigens or epitopes, which are different from the antigen or epitopes of interest. In such embodiments selection can include selection based on a characteristic other than binding affinity e.g. solubility. Template polypeptide constructs combining one or more physically existing or identified single domain antibodies with one or more theoretical single domain antibodies or linkers are also envisaged to be selected in the methods of the invention.

[0063] Thus, in particular embodiments, methods for obtaining a polypeptide construct directed against antigen or epitope X may involve the selection of a particular template polypeptide construct comprising one or more single domain antibodies directed against antigen or epitope X, the generation of a diversity of structural variants of polypeptide constructs directed against antigen or epitope X (for the nature of the diversity see below), and the selection of a polypeptide construct directed against antigen or epitope X, having one or more suitable characteristics, in addition to the binding to antigen or epitope X.

[0064] In further embodiments, methods of the invention are used for the generation of a polypeptide construct directed against more than one antigen, for instance against antigens or epitopes X and Y. In such methods, the selection of the template polypeptide construct may comprise the selection of a (physically existing or theoretical or combined existing/theoretical) template polypeptide construct directed (ore envisaged to be directed) against the two or more antigens or epitopes of interest (X and Y), e.g. comprising two (identified) single domain antibodies, each directed to one of the antigens or epitopes of interest (one single domain directed against X, one single domain antibody directed against Y). Such methods further comprise the step of generating a diversity of structural variants of polypeptide constructs directed against antigens or epitopes X and Y (this being determined by the nature of the template polypeptide construct, see below), and the selection of a polypeptide construct directed against antigens or epitopes X and Y, having one or more suitable characteristics, in addition to the binding to antigens or epitopes X and Y.

[0065] In these embodiments, the template polypeptide construct may be a theoretical construct or may comprise two or more single domain antibodies, possibly comprising one or more identified single domain antibodies known to be directed against X or Y. Accordingly, particular embodiments are envisaged where the template polypeptide construct comprises at least one identified single domain antibody known to be directed against one of the antigens (e.g. against antigen or epitope X) and at least one theoretical single domain antibody (e.g. a single domain antibody envisaged to be directed against antigen or epitope Y), the step of generating a diversity of structural variants may comprise generating a diversity of combinations (i.e. fusion proteins) of (e.g. one or more copies of) the identified single domain antibody known to be directed against X with e.g. a collection of different single domain antibodies (optionally directed against the other antigen or epitope Y, or random sequences which can be screened for binding to antigen or epitope Y). Alternatively, the template polypeptide construct may comprise two or more identified (i.e. previously generated) single domain antibodies each against one of both antigens or epitopes and the step of generating a diversity of structural variants may comprise generating polypeptide constructs comprising different combinations of the identified single domain antibodies (e.g. differing in number and/or relative position in the construct), and/or constructs comprising different modifications of (such as modifications of the CDR or FR regions of) either one or both of the identified single domain antibodies. In the selection step, a polypeptide construct having, in addition to the ability to recognize X and Y, one or more suitable characteristics such as suitable affinity (against X and/or Y), solubility etc. (as further described herein).

[0066] Accordingly, it is envisaged that the template polypeptide construct need not determine the number or the nature of the single domain antibodies in the diversity of polypeptide constructs generated nor in the polypeptide construct one would like to obtain from the methods of the invention. More particularly, it is noted that for the purpose of generating a polypeptide construct with improved affinity against an antigen, a template antibody can be selected which comprises one (physically existing or theoretical) single domain antibody against the antigen. In such embodiments, the step of producing a diversity of polypeptide constructs may comprise generating polypeptide constructs comprising different numbers of the same single domain antibody and/or different combinations of single domain antibodies directed against different epitopes of the same antigen, with the aim of obtaining a polypeptide construct with the desired suitable affinity for the antigen. The same applies when the methods of the invention are used for obtaining polypeptide constructs directed against two or more antigens.

[0067] Methods according to the present invention further comprise step (ii) of producing a diversity of polypeptide constructs that are structural variants of the selected template polypeptide construct. A diversity of structural variants of the template polypeptide construct according to the invention comprises different polypeptide constructs, each comprising at least two single domain antibodies that may be linked to each other and optionally to one or more other groups, residues, moieties or binding units.

[0068] Depending on the nature of the characteristic(s) desired for the polypeptide construct that one envisages to obtain with methods according to the invention, the produced diversity can comprise different types of structural variants for the template polypeptide construct. As detailed above, where the template polypeptide construct comprises one or more identified (i.e. previously generated) single domain antibodies, linkers or other structures or moieties, the diversity may comprise structural variants of the template polypeptide construct. Where the template polypeptide construct is a theoretical construct, the diversity needs to be generated starting from different newly generated single domain antibodies, linkers, structures or moieties.

[0069] In particular embodiments, the step of producing a diversity of structural variants of said template polypeptide construct may comprise producing a diversity of structural variants with regard to the number and/or identity of single domain antibodies in the polypeptide constructs. In particular embodiments, the template polypeptide construct comprises one single domain antibody and producing a diversity of structural variants for the template polypeptide construct may involve producing a diversity of antibody cosntructs comprising at least two single domain antibodies but more particularly three, four, five, six or more single domain antibodies.

[0070] According to particular embodiments the template antibody comprises an identified (i.e. previously generated) single domain antibody, and the one or more of the additional single domain antibodies present in the diversity of polypeptide constructs are either the same as or different from the identified single domain antibody envisaged in the template construct and may be the same or may be different from each other. For instance, where the template polypeptide construct is selected to comprise one single domain antibody of identity A, a diversity of structural variants with regard to the number of single domain antibodies may comprise polypeptide constructs comprising, in addition to single domain antibody A, one or more additional single domain antibodies of types A. Such structural variants may further be with regard to both the number and the identity of the single domain antibody A, such that the diversity of structural variants may comprise polypeptide constructs comprising, in addition to single domain antibody A, one or more single domain antibodies B, C, D, etc (such as e.g. without being limiting A-A, A-A-A, A-A-A-A, A-B, A-A-B, A-A-A-B, A-B-C, A-A-B-C, A-B-C-D, etc.). A similar diversity may be generated starting from a template polypeptide construct comprising two or more single domain antibodies.

[0071] Accordingly, in particular embodiments, the production of a diversity of structural variants for the template polypeptide construct may comprise obtaining structural variants having fewer, an equal number of or more single domain antibodies compared to the template polypeptide construct, wherein the single domain antibodies may be the same or may be different from each other, provided that each structural variant of the diversity comprises at least two single domain antibodies.

[0072] In further particular embodiments, the methods of the invention encompass generating a diversity of structural variants with regard to the relative position of single domain antibodies within the polypeptide constructs. According to more particular embodiments, a template polypeptide construct is selected comprising one or more single domain antibodies having a certain relative position within the template polypeptide construct, and the generation of a diversity of structural variants comprises generating polypeptide constructs comprising the same single domain antibodies of the template polypeptide construct, but with different relative positions within these structural variants compared to the template polypeptide construct. For instance, when a particular template polypeptide construct is selected comprising three single domain antibodies A, B and C that are positioned relative to one another in a configuration A-B-C (wherein “-” represents the linkage, e.g. via a linker sequence such as a peptide linker, between A and B), a diversity of structural variants may comprise structural variants comprising the same three single domain antibodies A, B and C positioned relative to one another in one of the configurations A-B-C, B-A-C, or B-C-A, or A-C-B, or C-A-B, or C-B-A.

[0073] As indicated above, it is further envisaged that structural variants may involve variants with regard to additional groups which can influence the desired characteristics of the polypeptide construct. Accordingly, in particular embodiments, the diversity of polypeptide constructs comprises variants with regard to the relative position of the single domain antibodies, including variants with respect to other groups, residues, moieties present in the polypeptide constructs. For instance, when a particular template polypeptide construct is selected comprising two single domain antibodies A and B that are positioned relative to one another in a configuration A-B (wherein “-” represents the linkage, e.g. via a linker sequence such as a peptide linker, between A and B), a diversity of structural variants may comprise structural variants comprising the same two single domain antibodies A and B positioned relative to one another in one of the configurations A-B, B-A, or . . . X-A-B, X-B-A, or A-B-X, B-A-X . . . or A-X-B, B-X-A, or B-X-X- . . . -A, or A-X-X- . . . B, wherein X may be other groups, moieties present in the diversity of structural variants.

[0074] In yet further particular embodiment, the generation of a diversity of structural variants for template polypeptide construct comprises generating a diversity of structural variants with regard to the amino acid residues of the CDR regions of the single domain antibodies in the polypeptide constructs. For instance, where a template antibody is selected comprising one or more single domain antibodies that are characterized by three specific CDR regions, a diversity of structural variants for the template polypeptide construct may be generated by providing different polypeptide constructs comprising the one or more single domain antibodies of the template polypeptide construct whereby in at least one of the three CDR regions of at least one of the single domain antibodies, one or more amino acid residues are different compared to the corresponding amino acid residues in the corresponding CDR regions in the template polypeptide construct.

[0075] For instance, starting from a template polypeptide construct comprising two or more identified (i.e. previously generated) single domain antibodies, each comprising three CDR regions, a diversity of structural variants with regard to the amino acid residues of the CDR regions of the single domains antibodies in the polypeptide construct may comprise a diversity of structural variants all comprising essentially the same single domain antibodies but having in at least one of the three CDR regions (such as in one, e.g. preferably in CDR3, in two, e.g. preferably in CDR2 and CDR3, or in all three) of at least one of the single domain antibodies, at least one amino acid substitution (i.e. an amino acid residue which has been replaced by another amino acid residue).

[0076] In a further particular embodiment, where the selected template polypeptide construct comprises two or more identified (i.e. previously generated) single domain antibodies, each comprising three CDR regions, a diversity of structural variants of the template polypeptide construct with regard to the amino acid residues of the CDR regions of the single domain antibodies in the polypeptide construct may comprise different polypeptide constructs each comprising essentially the same single domain antibodies, but having in at least one (such as in one, e.g. preferably in CDR3, in two, e.g. preferably in CDR2 and CDR3, or in all three) of the three CDR regions of at least one of the single domain antibodies, at least one amino acid residue which is deleted or added, compared to the template polypeptide construct.

[0077] For example, one or more of the CDR regions in the single domain antibody may be altered in order to provide single domain antibodies and/or polypeptide construct with increased affinity compared to the wild type single domain antibody and/or polypeptide construct (also referred to as affinity maturation). Alterations of the CDR regions may include (without being limiting) the addition, deletion and/or changing of one or more of the amino acid residues in the CDR region (e.g. applying point mutations at certain specified positions); CDR grafting, veneering, the (partially or fully) randomization of the amino acid residues in the CDR); DNA shuffling, chain shuffling, look-through mutagenesis, walk-through mutagenesis and any other technique known in the art or any suitable combination of any of the foregoing. Reference is for example made to (without being limiting) the techniques described in WO 91/15581, WO 05/003345, International applications by Ablynx N.V. PCT/EP2008/058617 and PCT/EP2008/058618 as well as U.S. provisional application 61/077,924 by Albynx N.V. filed on 7 Jul. 2008 entitled “Methods for providing improved immunoglobulin sequences”.

[0078] Such diversity of polypeptide constructs comprising an alteration in one or more of the CDR regions can be generated by any method known in the art (such as e.g. PCR assembly of an appropriate series or pool of olignonucleotides and similar techniques for engineering immunoglobulin sequences well known to the skilled person, followed by suitable expression).

[0079] In yet further particular embodiments of the methods described herein, the step of producing a diversity of polypeptide constructs starting from a template polypeptide construct comprising e.g. two or more identified (i.e. previously generated) single domain antibodies comprises producing a diversity of structural variants of the polypeptide construct with regard to the amino acid residues of the framework regions of the single domain antibodies in the polypeptide constructs. For instance, a diversity of structural variants of a template polypeptide construct comprising two or more single domain antibodies that are each characterized by four specific framework regions, may be a diversity of structural variants wherein, for one or both of the single domain antibodies, in at least one of the four framework regions one or more amino acid residues are different compared to the corresponding amino acid residues in the corresponding framework regions of the template polypeptide construct.

[0080] For instance, starting from a template polypeptide construct comprising two or more identified (i.e. previously generated) single domain antibodies, each comprising four framework regions, producing a diversity of structural variants with regard to the amino acid residues of the framework regions of the single domain antibodies, may comprise producing a diversity of polypeptide constructs comprising the essentially the same single domain antibodies but wherein in at least one (in one (such as in FR2 or FR4), in two (such as in FR2 and FR4 or in FR2 and FR3 or in FR3 and FR4), in three (such as in FR2, FR3 and FR4) or in all four) of the four framework regions (of one or more, such as two, three or more of the single domain antibodies) at least one amino acid residue has been replaced by another amino acid residue.

[0081] In further envisaged embodiments, when a template polypeptide construct is selected comprising two or more single domain antibodies, each comprising four framework regions, a diversity of structural variants of said template polypeptide construct with regard to the amino acid residues of the framework regions of the single domain antibodies in the polypeptide constructs, may comprise a diversity of structural variants comprising the same single domain antibodies, wherein in at least one (in one (such as in FR2 or FR4), in two (such as in FR2 and FR4 or in FR2 and FR3 or in FR3 and FR4), in three (such as in FR2, FR3 and FR4) or in all four) of the four framework regions (in one or more, such as one, two, three or more of the single domain antibodies of the construct) at least one amino acid residue has been added or deleted.

[0082] In a specific embodiment the amino acid sequence of the framework regions may be altered by “camelization” of specific amino acid residues in the framework regions. Camelization refers to the replacing or substitution of one or more amino acid residues in the amino acid sequence of a (naturally occurring) V_{H} domain from a conventional 4-chain antibody by one or more of the amino acid residues that occur at the corresponding position(s) in a V_{HH} domain of a heavy chain antibody. This can be performed in a manner known per se, which will be clear to the skilled person, for example on the basis of the further description herein. Such “camelizing” substitutions are preferably inserted at amino acid positions that form and/or are present at the V_{H}-V_{L} interface, and/or at the so-called Camelidae hallmark residues, as defined herein (see for example WO 94/04678, Davies and Riechmann FEBS Letters 339: 285-290, 1994; Davies and Riechmann Protein Engineering 9 (6): 531-537, 1996; Riechmann J. Mol. Biol. 259: 957-969, 1996; and Riechmann and Muyldermans J. Immunol. Meth. 231: 25-38, 1999).

[0083] In a specific embodiment the amino acid sequence of the framework regions may be altered by “humanization” of specific amino acid residues in the framework regions. In particular, humanized single domain antibodies may be single domain antibodies in which at least one amino acid residue is present (and in particular, in at least one of the framework residues) that is and/or that corresponds to a humanizing substitution. Potentially useful humanizing substitutions can be ascertained by comparing the sequence of the framework regions of a naturally occurring single domain antibody sequence with the corresponding framework sequence of one or more closely related human V_{H} sequences. The potentially useful humanizing substitutions (or combinations thereof) thus determined can be introduced into the polypeptide construct comprising said single domain antibody sequence (in any manner known per se, as further described herein). The resulting diversity of polypeptide constructs comprising at least one humanizing substitution in at least one single domain antibody can subsequently be screened for one or more desired properties.

[0084] In yet further particular embodiments of the methods of the invention, a template polypeptide construct is selected comprising two or more single domain antibodies, and the generation of a diversity of structural variants of the template polypeptide construct may also involve producing a diversity at the DNA level, i.e. a diversity of structural variants with regard to the codon usage in the selected template polypeptide construct. For instance, if a template polypeptide construct is characterized by an amino acid sequence that is obtained by expressing a particular nucleic acid sequence, wherein the nucleic acid sequence consists of a sequential number of codons, a diversity of structural variants may comprise a diversity of nucleic acid sequences encoding the same amino acid sequences wherein in each of the nucleic acid sequences at least one of the codons is different compared to the corresponding codons in the nucleic acid sequence coding for the amino acid sequence of the template polypeptide construct.

[0085] For instance, where a template polypeptide construct is selected comprising one or more single domain antibody amino acid sequences which are encoded by one or more selected nucleic acid sequences, the nucleic acid sequences consisting of a sequential number of codons, the step of producing a diversity of structural variants may involve producing structural variants wherein one or more nucleotide base pair changes have been introduced, such as by substitution, deletion or addition of one or more base pairs, compared to the one or more sequences encoding the template polypeptide construct. As a consequence, producing a diversity of structural variants of a template construct antibody with regard to codon usage may imply introducing variations at the nucleotide sequence level of the template polypeptide construct and accordingly may or may not result in variations in the amino acid sequences encoded by the structural variants.

[0086] According to further embodiments of the methods of the present invention, the step of producing a diversity of structural variants may comprise producing a diversity of structural variants and/or variations which involve more than one type of variants and/or variations described above, i.e. a combination of structural variants or variations such as but not limited to the following combinations of variants and/or variations, which include combinations of:
[0087] the number of the single domain antibodies in the polypeptide constructs (as described above) and the relative position of said single domain antibodies within said polypeptide constructs (as described above); or
[0088] the number and/or identity of the single domain antibodies in said polypeptide constructs (as described above) and the amino acid residues of the CDR regions of one or more single domain antibodies in the polypeptide constructs (as described above); or
[0089] the number of the single domain antibodies in the polypeptide constructs (as described above) and the amino acid residues of the framework region(s) of one or more of the single domain antibodies in the polypeptide constructs (as described above); or
[0090] the number and/or identity of the single domain antibodies in the polypeptide constructs (as described above) and the codon usage in the sequence encoding the selected template polypeptide construct (as described above); or
[0091] the relative position of the single domain antibodies within the polypeptide constructs (as described above) and the amino acid residues of the CDR region(s) of one or more of the single domain antibodies in the polypeptide constructs (as described above); or
[0092] the relative position of the single domain antibodies within the polypeptide constructs (as described above) and the amino acid residues of the framework region(s) of one or more of the single domain antibodies in the polypeptide constructs (as described above); or
[0093] the relative position of the single domain antibodies within the polypeptide constructs (as described above) and the codon usage in the nucleic acid sequences encoding the polypeptide constructs; or
[0094] the amino acid residues of the CDR region(s) of one or more of the single domain antibodies in the polypeptide constructs (as described above) and the amino acid residues of the framework region(s) of one or more of the single domain antibodies in the polypeptide constructs (as described above); or
[0095] the amino acid residues of the CDR region(s) of one or more of the single domain antibodies in the polypeptide constructs (as described above) and the codon usage in the nucleic acid sequences encoding the polypeptide constructs; or
[0096] the amino acid residues of the framework region(s) of one or more of the single domain antibodies in the polypeptide constructs (as described above) and the codon usage in the nucleic acid sequences encoding the polypeptide constructs; or
[0097] the number of said single domain antibodies in the polypeptide constructs (as described above), the relative position of the single domain antibodies within said polypeptide constructs (as described above) and the amino acid residues of the CDR region(s) of one or more of the single domain antibodies in the polypeptide constructs (as described above); or
[0098] the number and/or identity of the single domain antibodies in the polypeptide constructs (as described above), the relative position of the single domain antibodies within said polypeptide constructs (as described above) and the amino acid residues of the framework region(s) of the single domain antibodies in the polypeptide constructs (as described above); or
[0099] the number and/or identity of the single domain antibodies in the polypeptide constructs (as described above), the relative position of the single domain antibodies within the polypeptide constructs (as described above) and the codon usage in the nucleic acid sequences encoding the polypeptide constructs; or
[0100] the number and/or identity of the single domain antibodies in the polypeptide constructs (as described above), the amino acid residues of the CDR region(s) of on or more of the single domain antibodies in the polypeptide constructs (as described above) and the amino acid residues of the framework region(s) of one or more of the single domain antibodies in the polypeptide constructs (as described above); or
[0101] the number and/or identity of the single domain antibodies in the polypeptide constructs (as described above), the amino acid residues of the CDR region(s) of one or more of the single domain antibodies in the polypeptide constructs (as described above) and the codon usage in the nucleic acid sequences encoding the polypeptide constructs; or
[0102] the number and/or identity of the single domain antibodies in the polypeptide constructs (as described above), the amino acid residues of the framework region(s) of one or more of the single domain antibodies in the polypeptide constructs (as described above) and the codon usage in the nucleic acid sequences encoding the polypeptide constructs; or
[0103] the relative position of the single domain antibodies within the polypeptide constructs (as described above), the amino acid residues of the CDR region(s) of one or more of the single domain antibodies in the polypeptide constructs (as described above) and the amino acid residues of the framework region(s) of one or more of the single domain antibodies in the polypeptide constructs (as described above); or
[0104] the relative position of one or more of the single domain antibodies within the polypeptide constructs (as described above), the amino acid residues of the CDR region(s) of one or more of the single domain antibodies in said polypeptide constructs (as described above) and the codon usage in the nucleic acid sequences encoding the polypeptide constructs; or
[0105] the relative position of the single domain antibodies within the polypeptide constructs (as described above), the amino acid residues of the framework region(s) of one or more of the single domain antibodies in the polypeptide constructs (as described above) and the codon usage in the nucleic acid sequences encoding the polypeptide constructs; or
[0106] the amino acid residues of the CDR region(s) of one or more of the single domain antibodies in the polypeptide constructs (as described above), the amino acid residues of the framework region(s) of one or more of the single domain antibodies in the polypeptide constructs (as described above) and the codon usage in the nucleic acid sequences encoding the polypeptide constructs; or
[0107] the number and/or identity of the single domain antibodies in the polypeptide constructs (as described above), the relative position of the single domain antibodies within the polypeptide constructs (as described above), the amino acid residues of the CDR region(s) of one or more of the single domain antibodies in the polypeptide constructs (as described above) and the amino acid residues of the framework region(s) of one or more of the single domain antibodies in the polypeptide constructs (as described above) or;
[0108] the number and/or identity of the single domain antibodies in the polypeptide constructs (as described above), the relative position of the single domain antibodies within the polypeptide constructs (as described above), the amino acid residues of the CDR region(s) of one or more of the single domain antibodies in the polypeptide constructs (as described above) and the codon usage in the nucleic acid sequences encoding the polypeptide constructs; or
[0109] the number and/or identity of the single domain antibodies in the polypeptide constructs (as described above), the relative position of the single domain antibodies within the polypeptide constructs (as described above), the amino acid residues of the framework region(s) of one or more of the single domain antibodies in the polypeptide constructs (as described above) and the codon usage in the nucleic acid sequences encoding the polypeptide constructs; or
[0110] the amino acid residues of the CDR region(s) of one or more of the single domain antibodies in the polypeptide constructs (as described above), the amino acid residues of the framework region(s) of one or more of the single domain antibodies in the polypeptide constructs (as described above), the codon usage in the nucleic acid sequences encoding the polypeptide constructs and the number and/or identity of the single domain antibodies in the polypeptide constructs (as described above); or
[0111] the amino acid residues of the CDR region(s) of one or more of the single domain antibodies in the polypeptide constructs (as described above), the amino acid residues of the framework region(s) of one or more of the single domain antibodies in the polypeptide constructs (as described above), the codon usage in the nucleic acid sequences encoding the polypeptide constructs and the relative position of the single domain antibodies within the polypeptide constructs (as described above) or;
[0112] the amino acid residues of the CDR region(s) of one or more of the single domain antibodies in the polypeptide constructs (as described above), the amino acid residues of the framework region(s) of one or more of the single domain antibodies in the polypeptide constructs (as described above), the codon usage in the nucleic acid sequences encoding the polypeptide constructs, the relative position of the single domain antibodies within the polypeptide constructs (as described above) and the number and/or identity of the single domain antibodies in the polypeptide constructs (as described above).

[0113] The length, the degree of flexibility and/or other properties of the linker(s) used in polypeptide constructs may have some influence on the properties of the final polypeptide construct of the invention, including but not limited to the affinity, specificity or avidity for one or more particular antigens or epitopes.

[0114] Therefore, the methods of the present invention, also encompass in step (ii) producing a diversity of polypeptide constructs that are structural variants for the selected template polypeptide construct of step (i) comprises producing structural variants with regard to the peptide linkers. In particular embodiments modifying the peptide linkers may favorably affect one or more desirable characteristics of the polypeptide construct.

[0115] Accordingly, in further particular embodiments of step (ii) the methods described herein comprising producing a diversity of polypeptide constructs that are structural variants for the selected template polypeptide construct, comprises producing structural variants according to one or more of the following (non limiting) examples:
[0116] structural variants with regard to the composition and/or length of the one or more peptide linkers, and/or,
[0117] structural variants with regard to the number of the one or more linkers, and/or,
[0118] structural variants with regard to the relative position of the one or more linkers in the polypeptide constructs.

[0119] As described above, the template polypeptide construct selected in the methods of the present invention may be a theoretical template construct, comprising one or more single domain antibodies that are envisaged to be linked to each other and/or to other groups or moieties via suitable (peptide) linkers or spacers. Alternatively, the template polypeptide construct may be an isolated polypeptide construct, comprising one or more identified (i.e. previously generated) single domain antibodies that are linked to each other and/or to other groups or moieties via actual physical linkers and/or spacers.

[0120] Suitable spacers or linkers for use in multivalent (and optionally multispecific or multiparatopic) polypeptide constructs will be clear to the skilled person, and may generally be any linker or spacer used in the art to link amino acid sequences. Preferably, the linker and/or spacer is suitable for use in producing polypeptide constructs that are intended for pharmaceutical use.

[0121] Some particularly suitable linkers or spacers include the linkers and/or spacers that are used in the art to link antibody fragments or antibody domains. These include the linkers generally known in the art, as well as for example linkers that are used in the art to construct diabodies or ScFv fragments (in this respect, however, its should be noted that, whereas in diabodies and in ScFv fragments, the linker sequence used should have a length, a degree of flexibility and other properties that allow the pertinent V_{H} and V_{L} domains to come together to form the complete antigen-binding site, there is no particular limitation on the length or the flexibility of the linker used in the polypeptide constructs of the invention, since each single domain antibody by itself forms a complete antigen-binding site).

[0122] Some preferred examples of such amino acid sequences include gly-ser linkers, for example of the type (glyₓser_{y})_{z}, such as (for example (gly₄ser)₃ or (gly₃ser₂)₃, as described in WO 99/42077 and the GS30, GS15, GS9 and GS7 linkers described in the applications by Ablynx mentioned herein (see for example WO 06/040153 and WO 06/122825), as well as hinge-like regions, such as the hinge regions of naturally occurring heavy chain antibodies or similar sequences (such as described in WO 94/04678).

[0123] Some other particularly preferred linkers are poly-alanine (such as AAA), as well as the linkers GS35, GS30 (SEQ ID NO: 85 in WO 06/122825) and GS9 (SEQ ID NO: 84 in WO 06/122825).

[0124] Other suitable linkers generally comprise organic compounds or polymers, in particular those suitable for use in proteins for pharmaceutical use. For instance, polyethyleneglycol) moieties have been used to link antibody domains, see for example WO 04/081026.

[0125] According to particular embodiments of the methods of the present invention, the step of producing a diversity of polypeptide constructs that are structural variants for the selected template polypeptide construct comprising at least two single domain antibodies that are linked via one or more peptide linkers, comprises producing structural variants with regard to the composition and/or length of the one or more peptide linkers. In this respect, the different linkers in the diversity of polypeptide constructs may have one or more different amino acid residues in their amino acid sequence or they may have less or more amino acid residues resulting in a different linker length compared to the template polypeptide construct.

[0126] For instance, the step of producing a diversity of polypeptide constructs may comprise producing structural variants with regard to the amino acid sequence of the one or more peptide linkers in the template polypeptide construct.

[0127] Accordingly, starting from a template polypeptide construct comprising two or more identified (i.e. previously generated) single domain antibodies linked via one or more peptide linkers, generating a diversity of structural variants with regard to the amino acid sequence of the one or more peptide linkers, may comprise generating a diversity of polypeptide constructs comprising essentially the same linkers but wherein in at least one of the linkers at least one amino acid residue has been replaced by another amino acid residue.

[0128] For instance, producing a diversity of structural variants of polypeptide constructs with regard to the amino acid sequence of the one or more peptide linkers may involve producing structural variants comprising different types of Gly-Ser linkers, for example different types of (GlyₓSer_{y})_{z}.

[0129] Alternatively, the step of producing a diversity of polypeptide constructs that are structural variants for the selected template polypeptide construct comprising at least two single domain antibodies that are linked via one or more peptide linkers may comprise producing structural variants with regard to the length of the one or more peptide linkers.

[0130] Accordingly, starting from a template polypeptide construct comprising two or more identified (i.e. previously generated) single domain antibodies linked via one or more peptide linkers, generating a diversity of structural variants with regard to the length of said one or more peptide linkers, may comprise generating a diversity of polypeptide constructs comprising essentially the same linkers but wherein in at least one of the linkers at least one amino acid residue has been added and/or deleted.

[0131] For instance, producing a diversity of structural variants of polypeptide constructs with regard to the length of the one or more peptide linkers may involve producing structural variants comprising peptide linkers having a length varying between 1 and 50, such as a length varying between 1 and 35, or such as a length varying between 1 and 10 amino acid residues (such as e.g. Gly-Ser type linkers (Gly₄Ser)₃, (Gly₄S)₅, (Gly₄Ser)₆, etc.).

[0132] It is also encompassed in particular embodiments of the methods of the present invention that the step of producing a diversity of polypeptide constructs that are structural variants with regard to the composition and/or length of the one or more peptide linkers in the polypeptide constructs, may comprise producing structural variants with regard to the amino acid sequence of the one or more peptide linkers as well as with regard to the length of the one or more peptide linkers (such as e.g. Gly-Ser type linkers (Gly₄Ser)₃, (Gly₄S)₅, (Gly₄Ser)₆, etc. and (Gly₄Ser)₃ or (Gly₃Ser₂)₃).

[0133] Thus, where the template polypeptide construct comprises two or more identified (i.e. previously produced) single domain antibodies linked via one or more peptide linkers, generating a diversity of structural variants with regard to the amino acid sequence composition as well as with regard to the length of said one or more peptide linkers, may comprise generating a diversity of polypeptide constructs comprising essentially the same linkers but wherein in at least one of the linkers at least one amino acid residue has been substituted, added and/or deleted.

[0134] According to further particular embodiments of the methods of the present invention, the step of producing a diversity of polypeptide constructs that are structural variants for the selected template polypeptide construct comprising at least two single domain antibodies that are linked via one or more peptide linkers, comprises producing structural variants with regard to the number of said one or more peptide linkers.

[0135] For instance, starting from a template polypeptide construct comprising two identified (i.e. previously produced) single domain antibodies linked via one peptide linker, generating a diversity of structural variants with regard to the number of said one or more peptide linkers, may comprise generating a diversity of polypeptide constructs comprising the same two single domain antibodies that are directly linked, i.e. without using said one peptide linker.

[0136] Also, for example starting from a template polypeptide construct comprising three identified (i.e. previously generated) single domain antibodies linked via two peptide linkers, generating a diversity of structural variants with regard to the number of said one or more peptide linkers, may comprise generating a diversity of polypeptide constructs comprising the same three single domain antibodies, wherein said diversity of structural variants comprises none or one peptide linker.

[0137] Alternatively, starting from a template polypeptide construct comprising two identified (i.e. previously generated) single domain antibodies one or more other groups, moieties or binding units, wherein said polypeptide construct comprises three peptide linkers, generating a diversity of structural variants with regard to the number of said one or more peptide linkers, may comprise generating a diversity of polypeptide constructs comprising the same two single domain antibodies one or more other groups, moieties or binding units, wherein said diversity of structural variants comprises variants without linker, and/or variants with one or more peptide linkers, such as none, one, two, three, four, five, six, etc., wherein the one or more peptide linkers may link (a) said single domain antibodies to each other, (b) said one or more groups, moieties or binding units to each other, or (c) may interlink said single domain antibodies to said one or more other groups, moieties or binding units.

[0138] It should be stressed that the present embodiment also encompasses the production of a diversity of polypeptide constructs wherein one or more linkers are present or absent and thus a diversity of polypeptide constructs comprising polypeptide constructs wherein the single domain antibodies are directly linked to each other (or to one or more other groups, moieties or binding units) as well as comprising polypeptide constructs wherein the single domain antibodies are linked via a (peptide) linker to each other (or to one or more other groups, moieties or binding units).

[0139] According to yet further particular embodiments of the methods of the present invention, the step of producing a diversity of polypeptide constructs that are structural variants for the selected template polypeptide construct comprising at least two single domain antibodies that are linked via one or more peptide linkers, comprises producing structural variants with regard to the relative position of said one or more peptide linkers in the polypeptide constructs.

[0140] Accordingly, a template polypeptide construct may be selected comprising one or more peptide linkers having a certain relative position within the template polypeptide construct, and the generation of a diversity of structural variants comprises generating polypeptide constructs comprising the same peptide linkers as present in the template polypeptide construct, but wherein the peptide linkers have different relative positions within these structural variants compared to the template polypeptide construct.

[0141] For instance, when a particular template polypeptide construct is selected comprising four identified single domain antibodies (e.g. A, B, C, D) that are linked via three peptide linkers (e.g. “-”, “---” and “-------”) that are positioned relative to one another in a particular configuration (e.g. A-B---C-------D), a diversity of structural variants may comprise structural variants comprising the same four single domain antibodies (e.g. A, B, C and D) that are linked via the same three peptide linkers (e.g. “-”, “---” and “-------”), wherein said peptide linkers are positioned relative to one another in one of the following non-limiting configurations A-B---C------D, A---B-C-------D, A-B-------C---D, A---B-------C-D, A-------B-C---D, or A-------B---C-D.

[0142] As indicated above, it is further envisaged that structural variants may involve variants with regard to additional groups which can influence the desired characteristics of the polypeptide construct. Accordingly, in particular embodiments, the diversity of polypeptide constructs comprises variants with regard to the relative position of the one or more peptide linkers, including with respect to one or more other groups, moieties or binding units present in the polypeptide constructs. For instance, when a particular template polypeptide construct is selected comprising two identified single domain antibodies (e.g. A and B) and one other group, moiety or binding unit (e.g. X), linked to each other via two peptide linkers (e.g. “---” and “----------”) that are positioned relative to one another in a particular configuration (e.g. A----B----------X and A----B----------X), a diversity of structural variants may comprise structural variants comprising the same two single domain antibodies (e.g. A and B) and the same one other group or moiety (e.g. X), linked to each other via the same two peptide linkers (e.g. “----” and “----------”), wherein said peptide linkers are positioned relative to one another in the configuration (e.g. A----------B-----X).

[0143] According to further embodiments of the methods of the present invention, the step of producing a diversity of structural variants may comprise generating a diversity of structural variants which involve more than one type of variation of the one or more peptide linkers, i.e. a combination of structural variations such as but not limited to the following combinations of variations, which include combinations of:
[0144] the composition and/or length of the one or more peptide linkers in the polypeptide constructs (as described above) and the number of the one or more peptide linkers in the polypeptide constructs (as described above); or
[0145] the composition and/or length of the one or more peptide linkers in the polypeptide constructs (as described above) and the relative position of the one or more peptide linkers in the polypeptide constructs (as described above); or
[0146] the number of the one or more peptide linkers in the polypeptide constructs (as described above) and the relative position of the one or more peptide linkers in the polypeptide constructs (as described above); or
[0147] the composition and/or length of the one or more peptide linkers in the polypeptide constructs (as described above), the number of the one or more peptide linkers in the polypeptide constructs (as described above) and the relative position of the one or more peptide linkers in the polypeptide constructs (as described above).

[0148] It will be understood to the skilled person that methods are equally envisaged wherein, upon generating a diversity of polypeptide constructs, said diversity of polypeptide constructs may encompass both structural variants with regard to both the single domain antibodies as well as structural variants with regard to the (peptide) linkers or spacers.

[0149] For example, in multivalent polypeptide constructs of the invention that comprise single domain antibodies directed against a multimeric antigen (such as a multimeric receptor, ligand or other protein), the length and flexibility of the linker are preferably such that it allows each single domain antibody of the invention present in the polypeptide construct to bind to the antigenic determinant on each of the subunits of the multimer. Similarly, in a multispecific polypeptide construct of the invention that comprises single domain antibodies directed against two or more different antigenic determinants on the same antigen (for example against different epitopes of an antigen and/or against different subunits of a multimeric receptor, channel or protein), the length and flexibility of the linker are preferably such that it allows each single domain antibody to bind to its intended antigenic determinant. Based on the disclosure herein, the skilled person will be able to determine the optimal linker(s) for use in a specific polypeptide of the invention.

[0150] This particular embodiment of the present invention is particularly suited for the selection of or screening for polypeptide construct comprising at least two single domain antibodies that preferentially show intramolecular binding to a certain antigen compared to intermolecular binding. By “intramolecular” binding is meant that the polypeptide construct of the invention can simultaneously bind two epitopes on the same antigen (these two epitope can be the same, e.g. if the antigen is a multimer; or these epitopes may be different, e.g. when the method of the invention is used for screening multipartopic polypeptide constructs (as is further defined herein)).

[0151] The choice of linker length in biparatopic, triparatopic or multiparatopic polypeptides of the invention can also be such that only a limited epitope space on the antigen is covered. Linker length restriction can, for example, help to avoid targeting epitopes which should not be neutralized (e.g. those essential for a function of the antigen) or to target regions relatively adjacent to a first ‘guiding’ single domain antibody.

[0152] The choice of the format (N- or C-terminal position of the different single domain antibodies) of the biparatopic, triparatopic or multiparatopic polypeptides of the invention and linker length can also be used to obtain molecules that bind avidly to the target antigen (via two, or more, binding sites), yet are purposely not agonistic. By optimising the format and linker length and composition, the binding sites can be positioned in such way that simultaneous binding of two or more single domain antibodies to the same target antigen (i.e. intramolecular binding) will be highly favoured compared to binding to separate antigens in proximity of one another (intermolecular binding, such as e.g. on a cell surface). This could, for example, reduce the chance on agonism (which might not be desired in a good therapeutic compound). Screening and/or selection methods (as further described herein) will allow for the isolation of avidly binding domains positioned in relation to one another and to the antigen of interest in such way as to have an antagonistic function only.

[0153] In another aspect of the invention, biparatopic, triparatopic or multiparatopic polypeptides of the invention can also be selected to be purposely agonistic. For example, a combination of two identical or two different Nanobodies that bind to the Herceptin®-binding site on HER2 and are genetically fused to one another can be agonistic (e.g. 2D3-2D3 or 2D3 fused to other Herceptin®-competing Nanobodies). The current invention also provides a way to select for such agonistic biparatopic, triparatopic or multiparatopic polypeptides of the invention using appropriate screening and/or selection procedures (as further described herein) of members of the diversity of structural variants. Agonists could, for example, be desired and/or interesting for triggering certain receptors.

[0154] It is also within the scope of the invention that the linker(s) used confer one or more other favourable properties or functionality to the polypeptides of the invention, and/or provide one or more sites for the formation of derivatives and/or for the attachment of functional groups (e.g. as described herein for the derivatives of the Nanobodies of the invention). For example, linkers containing one or more charged amino acid residues (see Table A-2 on page 48 of the International application WO 08/020,079) can provide improved hydrophilic properties, whereas linkers that form or contain small epitopes or tags can be used for the purposes of detection, identification and/or purification.

[0155] Methods for the production of a diversity of polypeptide constructs according to the embodiments described above, are known in the art and include for example the production of single domain antibodies, including dAb's, Nanobodies, V_{HH}'s and other single variable domains and subsequently linking these single domain antibodies to each other and optionally to other groups, moieties or binding units via suitable (peptide) linkers, such that different structural variants comprising combinations of the individual single domain antibodies and optionally other groups, moieties or binding units are formed.

[0156] In this respect, naturally occurring V_{HH} domains against a particular antigen or target, can be obtained from (naïve or immune) libraries of Camelid V_{HH} sequences. Such methods may or may not involve screening such a library using said antigen or target, or at least one part, fragment, antigenic determinant or epitope thereof using one or more screening techniques known per se. Such libraries and techniques are for example described in WO 99/37681, WO 01/90190, WO 03/025020 and WO 03/035694. Alternatively, improved synthetic or semi-synthetic libraries derived from (naïve or immune) V_{HH} libraries may be used, such as V_{HH} libraries obtained from (naïve or immune) V_{HH} libraries by techniques such as random mutagenesis and/or CDR shuffling, as for example described in WO 00/43507.

[0157] Yet another technique for obtaining V_{HH} sequences or Nanobody sequences directed against a particular antigen or target involves suitably immunizing a transgenic mammal that is capable of expressing heavy chain antibodies (i.e. so as to raise an immune response and/or heavy chain antibodies directed against said antigen or target), obtaining a suitable biological sample from said transgenic mammal that contains (nucleic acid sequences encoding) said V_{HH} sequences or Nanobody sequences (such as a blood sample, serum sample or sample of B-cells), and then generating V_{HH} sequences directed against said antigen or target, starting from said sample, using any suitable technique known per se (such as any of the methods described herein or a hybridoma technique). For example, for this purpose, the heavy chain antibody-expressing mice and the further methods and techniques described in WO 02/085945, WO 04/049794 and WO 06/008548 and Janssens et al., Proc. Natl. Acad. Sci. USA. 2006 Oct. 10; 103(41):15130-5 can be used. For example, such heavy chain antibody expressing mice can express heavy chain antibodies with any suitable (single) variable domain, such as (single) variable domains from natural sources (e.g. human (single) variable domains, Camelid (single) variable domains or shark (single) variable domains), as well as for example synthetic or semi-synthetic (single) variable domains.

[0158] For the generation of (single) domain antibodies from conventional four-chain antibodies, reference is made to EP 0 368 684, to Ward et al. (Nature 1989 Oct. 12; 341 (6242): 544-6), to Holt et al., Trends Biotechnol., 2003, 21(11):484-490; as well as to for example WO 06/030220, WO 06/003388 and other published patent applications of Domantis Ltd.

[0159] It should also be noted that, although less preferred in the context of the present invention because they are not of mammalian origin, single domain antibodies or single variable domains can be generated from certain species of shark (for example, the so-called “IgNAR domains”, see for example WO 05/18629).

[0160] In particular embodiments of the methods of the invention, the production of structural variants may typically involve generating structural variants with a variation with respect to the single domain antibody and/or linker (as described above), known to affect the one or more desired characteristics. For instance, where stability is a desired characteristic, the template polypeptide construct may comprise two identified (i.e. previously generated) single domain antibodies and the generation of a diversity of structural variants of the template polypeptide construct may involve introducing chemical modifications to the template polypeptide construct which are envisaged to affect the half-life thereof (for example, by means of different forms of pegylation); alternatively, such structural variants may comprise at least one binding unit consisting of a single domain antibody directed against a serum protein (such as serum albumin), or such structural variants may comprise at least one additional moiety (and in particular at least one additional amino acid sequence) that increases the half-life of the template polypeptide construct of the invention.

[0161] Examples of structural variants which can be generated in this regard include but are not limited to structural variants comprising:
[0162] structural variants comprising at least two single domain antibodies (e.g. those of the template polypeptide construct) each suitably linked to a different poly(ethylene glycol) polymer chain;
[0163] structural variants comprising at least two single domain antibodies (e.g. those of the template polypeptide construct) each suitably linked to one or more serum proteins or fragments thereof (such as (human) serum albumin or suitable fragments thereof); or
[0164] structural variants comprising at least one single domain antibody linked to one or more single domain antibodies which bind to serum proteins such as serum albumin (such as human serum albumin), serum immunoglobulins such as IgG, or transferrine);
[0165] structural variants comprising at least one single domain antibodylinked to an Fc portion (such as a human Fe) or a suitable part or fragment thereof, or linked to one or more small proteins or peptides that can bind to serum proteins (such as, without limitation, the proteins and peptides described in WO 91/01743, WO 01/45746, WO 02/076489 and to WO 08/068,280.

[0166] In particular embodiments of methods of the present invention, the generation of a diversity of polypeptide constructs comprises generating polypeptide constructs which contain two or more binding units which are single domain antibodies that are directed against different antigenic determinants, epitopes, parts, domains, subunits or conformations (where applicable) of the same antigen. Generally, such polypeptide constructs bind to the antigen with increased avidity compared to a binding unit comprising only one single domain antibody directed against the antigen. Such polypeptide constructs may for example comprise two single domain antibodies i.e. one “first” single domain antibody that is directed against a first antigenic determinant, epitope, part, domain, subunit or conformation (where applicable) of an antigen (which may or may not be an interaction site); and a “second” single domain antibody that is directed against a second antigenic determinant, epitope, part, domain, subunit or conformation (where applicable) different from the first antigenic determinant, epitope, part, domain, subunit or conformation (where applicable) of the antigen (and which again may or may not be an interaction site). A diversity of such polypeptide constructs may comprise combinations of different “first” and “second” single domain antibodies. Additionally or alternatively, a diversity may comprise a varying number of copies of the “first” and “second” single domain antibody. Additionally a diversity can be generated comprising more than two single domain antibodies directed against a different epitope (i.e. polypeptide constructs may comprise “third”, “fourth”, etc. single domain antibodies). In particular embodiments, in such “biparatopic” and/or “multiparatopic” (as defined herein) polypeptide constructs generated in methods of the invention, at least one single domain antibody is directed against an interaction site (as defined herein), although the invention in its broadest sense is not limited thereto.

[0167] Accordingly, in particular embodiments, the methods of the present invention for obtaining a polypeptide construct directed against one or more antigens and/or epitopes having one or more desired characteristics, wherein the polypeptide construct comprises at least two single domain antibodies, involve the generation of biparatopic and/or multiparatopic (such as e.g. triparatopic, tetraparatopic etc.) polypeptide constructs.

[0168] Without being limited thereto, methods for generating a diversity of bi- and mulitparatopic polypeptide constructs directed against a particular antigen and comprising at least two single domain antibodies may for example comprise at least the step of providing a nucleic acid sequence encoding a first amino acid sequence binding a first antigenic determinant, epitope, part, domain, subunit or conformation and fusing it to a set, collection or library of nucleic acid sequences encoding amino acid sequences; and ensuring adequate expression thereof.

[0169] The methods for generating a polypeptide construct of the invention typically further comprise screening the diversity of expressed polypeptide constructs for constructs capable of binding to the antigen of interest with increased affinity (and/or avidity) and/or for constructs that can bind to a second antigenic determinant, epitope, part, domain, subunit or conformation of the antigen different from the antigenic determinant, epitope, part, domain, subunit or conformation recognized by the first amino acid sequence; optionally the methods may involve screening for one or more further desired characteristics.

[0170] Further embodiments of the methods of the invention may optionally comprise isolating the nucleic acid sequence encoding the polypeptide construct comprising the first amino acid sequence fused to a second nucleic acid sequence identified in the screening step, followed by expressing the encoded amino acid sequence.

[0171] For example, where the antigen is HER2, without being limited thereto, methods for generating a diversity of bi- and multiparatopic polypeptide constructs directed against HER2 comprising at least two single domain antibodies may for example comprise at least the step of providing a nucleic acid sequence encoding a HER2 binding amino acid sequence (such as a single domain antibody) (binding a first antigenic determinant of HER2) and fusing it to a set, collection or library of nucleic acid sequences encoding amino acid sequences (such as single domain antibodies); and ensuring adequate expression thereof. Accordingly, the methods of generating a polypeptide construct directed against HER2 typically further comprise screening the so obtained diversity of expressed polypeptide constructs for constructs capable of binding to HER2 with increased affinity (and/or avidity) and/or for constructs that can bind to and/or have affinity for a (second) antigenic determinant of HER2 different from the first antigenic determinant; the methods of the invention may further optionally comprise screening for one or more further desired characteristics.

[0172] Further, the methods of the invention may optionally comprise isolating the nucleic acid sequence encoding the polypeptide construct comprising the HER2 amino acid sequence fused to the nucleic acid sequence identified in the screening step, followed by expressing the encoded amino acid sequence.

[0173] It will be understood that the nucleic acid sequences encoding the biparatopic polypeptide constructs obtained according to the method above, can subsequently be fused to one or more further sets, collections or libraries of nucleic acid sequences encoding amino acid sequences and again be screened for nucleic acid sequences that encode polypeptide constructs that can bind to and/or have affinity for an antigenic determinant on the antigen (e.g. HER2) different from the first and second antigenic determinants of the antigen (e.g. HER2), in order to obtain a triparatopic or further multiparatopic polypeptide constructs.

[0174] According to particular embodiments, methods for generating a polypeptide construct directed against HER2, which involve generating bi- and mulitparatopic polypeptide constructs may for example comprise at least the step of:
[0175] a) providing a set, collection or library of nucleic acid sequences, in which each nucleic acid sequence in said set, collection or library encodes a fusion protein that comprises a first amino acid sequence that can bind to and/or has affinity for a first antigenic determinant, part, domain or epitope on HER2 that is fused (optionally via a linker sequence) to a second amino acid sequence, in which essentially each second amino acid sequence (or most of these) is a different member of a set, collection or library of different amino acid sequences;
[0176] b) screening said set, collection or library of nucleic acid sequences for nucleic acid sequences that encode an amino acid sequence that can bind to and/or has affinity for a second antigenic determinant, part, domain or epitope on HER2 different from the first antigenic determinant, part, domain or epitope on HER-2;
[0177] and
[0178] c) isolating the nucleic acid sequences that encode an amino acid sequence that can bind to and/or has affinity for a second antigenic determinant, part, domain or epitope on HER2 different from the first antigenic determinant, part, domain or epitope on HER-2, obtained in b), optionally followed by expressing the encoded amino acid sequence.

[0179] In these embodiments of the methods of the invention, the first amino acid sequence in the polypeptide construct (fusion protein) encoded by said set collection or library of nucleic acid sequences may be the same amino acid sequence for all members of the set, collection or library of nucleic acid sequences encoding the polypeptide construct (fusion protein); or the first amino acid sequence in the polypeptide construct (fusion protein) encoded by said set collection or library of nucleic acid sequences may also be a member of a set collection or library of different amino acid sequences.

[0180] In particular embodiments of methods of the invention wherein HER2 is the antigen of interest, in step b) as described above, the set, collection or library of nucleic acid sequences may also be screened for nucleic acid sequences that encode an amino acid sequence that can bind to and/or has affinity for both a first antigenic determinant, part, domain or epitope on HER2 and a second antigenic determinant, part, domain or epitope on HER2. This may for example be performed in a subsequent steps (i.e. by in a first step screening or selecting for nucleic acid sequences that encode an amino acid sequence that can bind to and/or has affinity for the second antigenic determinant, part, domain or epitope on HER2, and subsequently in a second step selecting or screening for nucleic acid sequences that encode an amino acid sequence that can bind to and/or has affinity for the first antigenic determinant, part, domain or epitope on HER2; or visa versa) or in a single step (i.e. by simultaneously screening or selecting for nucleic acid sequences that encode an amino acid sequence that can bind to and/or has affinity for both the first antigenic determinant, part, domain or epitope on HER2 and the second antigenic determinant, part, domain or epitope on HER2).

[0181] In further particular embodiments of the above-described methods, the first amino acid sequence used in step a) is preferably such that (i) it can bind to and/or has affinity for the Herceptin® binding site on HER2 (and may in particular be directed against domain IV of HER2, more in particular the C-terminus of domain IV of HER2) and/or (ii) competes with Herceptin for binding to HER-2; and in step b), the set, collection or library of nucleic acid sequences is screened for nucleic acid sequences that encode (i) an amino acid sequence that can bind to and/or has affinity for the Omnitarg® binding site on HER2 (and may in particular domain II of HER2, more in particular the middle of domain II of HER2) and/or (ii) an amino acid sequence that can compete with Omnitarg® (or the Omnitarg Fab used in Example 9) for binding to HER-2.

[0182] Alternatively, in particular embodiments, the first amino acid sequence used in step a) is preferably such that (i) it can bind to and/or has affinity for the Omnitarg® binding site on HER2 (and may in particular domain II of HER2, more in particular the middle of domain II of HER2) and/or (ii) competes with Omnitarg for binding to HER-2; and in step b), the set, collection or library of nucleic acid sequences is screened for nucleic acid sequences that encode (i) an amino acid sequence that can bind to and/or has affinity for the Herceptin® binding site on HER2 (and in particular domain IV of HER2, more in particular the C-terminus of domain IV of HER2) and/or (ii) an amino acid sequence that can compete with Herceptin for binding to HER-2.

[0183] In the above methods, screening or selecting for (nucleic acid sequences that encode) amino acid sequences that compete with Herceptin® or Omnitarg, respectively, may be performed using generally known methods for screening or selecting for competitors of known binding molecules, which may for example involve performing the screening or selection in the presence of the binding molecule and/or determining the binding affinity of the compound(s) to be screened in the presence of the binding molecule.

[0184] It is also possible, in step b) of the methods described above, to screen for nucleic acid sequences that both (i) encode an amino acid sequence that can bind to and/or has affinity for the Omnitarg® binding site on HER2 (and in particular domain II of HER2, more in particular the middle of domain II of HER2) and/or that can compete with Omnitarg® (or the Omnitarg Fab used in Example 9) for binding to HER-2; and that also (ii) encode an amino acid sequence that can bind to and/or has affinity for the Herceptin® binding site on HER2 (and in particular domain IV of HER2, more in particular the C-terminus of domain IV of HER2) and/or that can compete with Herceptin® for binding to HER-2. Again, this may be performed in separate steps or a single step, and by selecting or screening in the presence of Herceptin® and/or Omnitarg, as applicable.

[0185] It will also be clear to the skilled person that the above methods may be performed by screening a set, collection or library of amino acid sequences that correspond to (e.g. are encoded by) the nucleic acid sequences used in the above method; and such methods form further aspects of the invention.

[0186] In further particular embodiments of the methods of the invention, the step of generating a diversity of polypeptide constructs involves generating a diversity of biparatopic polypeptide constructs which are structural variants with regard to the linker sequence, linking the single domain antibodies. The step of generating a diversity thus may comprise providing a set, collection or library of nucleic acid sequences, in which each nucleic acid sequence in said set, collection or library encodes a polypeptide construct (a fusion protein) that comprises a first amino acid sequence (such as a single domain antibody) that can bind to and/or has affinity for a first antigenic determinant, part, domain or epitope on an antigen of interest (such as HER2) that is fused via a linker sequence to a second amino acid sequence (such as a single domain antibody) that can bind to and/or has affinity for a second antigenic determinant, part, domain or epitope on the antigen of interest (which may be the same or different as the first antigenic determinant, part, domain or epitope on the antigen of interest), in which essentially each nucleic acid sequence (or most of these) encodes a fusion protein with a different linker sequence so as to provide a set, collection or library encoding different polypeptide constructs (fusion proteins);

[0187] The methods of the present invention for generating a polypeptide construct against an antigen of interest typically will further comprise the step of screening the so obtained set, collection or library of nucleic acid sequences for nucleic acid sequences that encode a polypeptide construct (fusion protein) that can bind to and/or has affinity for the first and second antigenic determinant, part, domain or epitope on the antigen of interest (e.g. HER2). Moreover, in particular embodiments, the methods of the present invention may further comprise isolating the nucleic acid sequences that encode polypeptide construct (fusion protein) that can bind to and/or has affinity for the first and second antigenic determinant, part, domain or epitope on the antigen of interest, optionally followed by expressing the encoded amino acid sequence.

[0188] As will be clear to the skilled person, these methods can be used to screen for suitable or even optimal linker lengths for linking the first and second amino acid sequence. For example, in this aspect, where the antigen of interest is HER2, the first amino acid sequence (such as a single domain antibody) may be an amino acid sequence (such as a single domain antibody and preferably a Nanobody) that can bind to and/or has affinity for the Omnitarg® binding site on HER2 (and may in particular domain II of HER2, more in particular the middle of domain II of HER2) and/or that can compete with Omnitarg® (or the Omnitarg Fab used in Example 9); and the second amino acid sequence (such as a single domain antibody) may be an amino acid sequence (such as a single domain antibody and preferably a Nanobody) that can bind to and/or has affinity for the Herceptin® binding site on HER2 (and in particular domain IV of HER2, more in particular the C-terminus of domain IV of HER2) and/or that can compete with Herceptin® for binding to HER-2 (or visa versa). The screening and selection may be performed as further described above.

[0189] In yet further embodiments of methods of the present invention, the methods comprise at least the steps of:
[0190] a) providing a set, collection or library of nucleic acid sequences encoding amino acid sequences (such as single domain antibodies);
[0191] b) screening said set, collection or library of nucleic acid sequences for a set, collection or library of nucleic acid sequences that encode an amino acid sequence (such as a single domain antibody) that can bind to and/or has affinity for the antigen of interest, such as for instance HER2;
[0192] c) ligating said set, collection or library of nucleic acid sequences that encode an amino acid sequence (such as a single domain antibody) that can bind to and/or has affinity for the antigen of interest to another nucleic acid sequence that encodes an amino acid sequence that can bind to and/or has affinity for the antigen of interest (e.g. a nucleic acid sequence that encodes an amino acid sequence that competes with Herceptin® for binding HER2);
[0193] and
[0194] d) from the set, collection or library of nucleic acid sequences obtained in c), isolating the nucleic acid sequences encoding a biparatopic polypeptide construct that can bind to and/or has affinity for the antigen of interest (and e.g. further selecting for nucleic acid sequences that encode a biparatopic amino acid sequence that antagonizes with higher potency compared to the monovalent amino acid sequences), followed by expressing the encoded polypeptide construct.

[0195] The nucleic acid sequences encoding the biparatopic polypeptide construct obtained in the methods above, can subsequently be fused to one or more further sets, collections or libraries of nucleic acid sequences encoding amino acid sequences (such as a single domain antibodies) that can bind to and/or have affinity for the antigen of interest in order to obtain a triparatopic or multiparatopic amino acid sequence respectively. In addition the steps described above can also be used in the generation of polypeptide constructs directed against two (or more) different antigens (e.g. HER2 and CD3, HER2 and CD16) so as to obtain polypeptide constructs which are bispecific, trispecific or multispecific.

[0196] Similarly, the steps described above can also be used in the generation of polypeptide constructs directed against two (or more) (different) epitopes on the same antigens as well as against two (or more) different antigens so as to obtain polypeptide constructs which are bispecific, trispecific and/or multispecific in addition to being biparatopic, triparatopic and/or multiparatopic.

[0197] In yet further particular embodiments of the methods of the invention for generating a polypeptide construct directed against an antigen of interest (such as HER2), the methods comprise at least the steps of:
[0198] a) providing a first set, collection or library of nucleic acid sequences encoding amino acid sequences (such as single domain antibodies);
[0199] b) screening said first set, collection or library of nucleic acid sequences for a nucleic acid sequence that encodes an amino acid sequence (such as a single domain antibody) that can bind to and/or has affinity for a first antigenic determinant, part, domain or epitope on an antigen of interest (such as HER2);
[0200] c) ligating the nucleic acid sequence encoding said amino acid sequence (such as a single domain antibody) that can bind to and/or has affinity for a first antigenic determinant, part, domain or epitope on the antigen of interest to another set, collection or library of nucleic acid sequences encoding amino acid sequences (such as single domain antibodies) to obtain a set, collection or library of nucleic acid sequences that encode fusion proteins;
[0201] d) screening said set, collection or library of nucleic acid sequences obtained in step c) for a nucleic acid sequence that encodes an amino acid sequence (such as a single domain antibody) that can bind a second antigenic determinant, part, domain or epitope on the antigen of interest different from the first antigenic determinant, part, domain or epitope on the antigen of interest;
[0202] and
[0203] e) isolating the nucleic acid sequence that encodes an amino acid sequence (such as a single domain antibody) that can bind to and/or has affinity for the first and second antigenic determinant, part, domain or epitope on the antigen of interest, optionally followed by expressing the encoded polypeptide construct.

[0204] Similar to the embodiments above, the biparatopic polypeptide construct obtained in these methods can subsequently be fused to one or more further sets, collections or libraries of nucleic acid sequences encoding amino acid sequences (such as single domain antibodies) that can bind to and/or have affinity for the antigen of interest in order to obtain a triparatopic or multiparatopic polypeptide construct respectively.

[0205] In addition the steps described above can also be used in the generation of polypeptide constructs directed against two (or more) different antigens (e.g. HER2 and CD3, HER2 and CD16) so as to obtain polypeptide constructs which are bispecific, trispecific or multispecific.

[0206] Similarly, the steps described above can also be used in the generation of polypeptide constructs directed against two (or more) (different) epitopes on the same antigens as well as against two (or more) different antigens so as to obtain polypeptide constructs which are bispecific, trispecific and/or multispecific in addition to being biparatopic, triparatopic and/or multiparatopic.

[0207] In particular embodiments of the above method, the antigen of interest is HER2 and the first amino acid sequence (such as a single domain antibody) obtained in step b) described above is preferably such that (i) it can bind to and/or has affinity for Herceptin® binding site on HER2 (and may in particular be directed against domain IV of HER2, more in particular the C-terminus of domain IV of HER2) and/or (ii) competes with Herceptin® for binding to HER-2; and in step d), the set, collection or library of nucleic acid sequences is screened for nucleic acid sequences that encode (i) an amino acid sequence that can bind to and/or has affinity for the Omnitarg binding site on HER2 (and may in particular domain II of HER2, more in particular the middle of domain II of HER2) and/or (ii) an amino acid sequence that can compete with Omnitarg (or the Omnitarg Fab used in Example 9) for binding to HER-2.

[0208] In alternative embodiments of the methods of the present invention aimed at generating polypeptide constructs against HER2, the first amino acid sequence obtained in step b) described above is preferably such that (i) it can bind to and/or has affinity for the Omnitarg binding site on HER2 (and may in particular domain II of HER2, more in particular the middle of domain II of HER2) and/or (ii) competes with Omnitarg for binding to HER-2; and in step d), the set, collection or library of nucleic acid sequences is screened for nucleic acid sequences that encode (i) an amino acid sequence that can bind to and/or has affinity for the Herceptin® binding site on HER2 (and in particular domain IV of HER2, more in particular the C-terminus of domain IV of HER2) and/or (ii) an amino acid sequence that can compete with Herceptin® for binding to HER-2.

[0209] In the above methods wherein the antigen of interest is HER2 screening or selecting for (nucleic acid sequences that encode) amino acid sequences (such as the single domain antibodies or polypeptide constructs) that compete with Herceptin® or Omnitarg, respectively, may be performed using generally known methods for screening or selecting for competitors of known binding molecules, which may for example involve performing the screening or selection in the presence of the binding molecule and/or determining the binding affinity of the compound(s) to be screened in the presence of the binding molecule.

[0210] It is also possible, in particular embodiments of the invention aimed at generating suitable polypeptide constructs directed against HER2, that step d) as described above, encompasses screening for nucleic acid sequences that both (i) encode an amino acid sequence that can bind to and/or has affinity for the Omnitarg® binding site on HER2 (and in particular domain II of HER2, more in particular the middle of domain II of HER2) and/or that can compete with Omnitarg® (or the Omnitarg Fab used in Example 9) for binding to HER-2; and that also (ii) encode an amino acid sequence that can bind to and/or has affinity for the Herceptin® binding site on HER2 (and in particular domain IV of HER2, more in particular the C-terminus of domain IV of HER2) and/or that can compete with Herceptin® for binding to HER-2. Again, this may be performed in separate steps or a single step, and by selecting or screening in the presence of Herceptin® and/or Omnitarg, as applicable.

[0211] In the different embodiments of the methods of the invention described herein, the set, collection or library of nucleic acid sequences encoding amino acid sequences may for example be a set, collection or library of nucleic acid sequences encoding a naïve set, collection or library of immunoglobulin sequences; a set, collection or library of nucleic acid sequences encoding a synthetic or semi-synthetic set, collection or library of immunoglobulin sequences; and/or a set, collection or library of nucleic acid sequences encoding a set, collection or library of immunoglobulin sequences that have been subjected to affinity maturation.

[0212] Additionally or alternatively, in the methods described herein, the set, collection or library of nucleic acid sequences may encode a set, collection or library of heavy chain variable domains (such as V_{H} domains or V_{HH} domains) or of light chain variable domains. For example, the set, collection or library of nucleic acid sequences may encode a set, collection or library of domain antibodies or single domain antibodies, or a set, collection or library of amino acid sequences that are capable of functioning as a domain antibody or single domain antibody.

[0213] In further particular embodiments, the set, collection or library of nucleic acid sequences may be an immune set, collection or library of nucleic acid sequences, for example derived from a mammal that has been suitably immunized with the antigen of interest such as HER2 or with a suitable antigenic determinant based thereon or derived therefrom, such as an antigenic part, fragment, region, domain, loop or other epitope thereof. In one particular aspect, the antigenic determinant may be an extracellular part, region, domain, loop or other extracellular epitope(s).

[0214] The set, collection or library of nucleic acid sequences may for example encode an immune set, collection or library of heavy chain variable domains or of light chain variable domains. In one specific aspect, the set, collection or library of nucleotide sequences may encode a set, collection or library of V_{HH} sequences.

[0215] In the above methods, the nucleic acid sequence encoding an amino acid sequence binding the antigen/epitope of interest fused to the set, collection or library of nucleotide sequences may be displayed on a phage, phagemid, ribosome or suitable micro-organism (such as yeast), such as to facilitate screening. Suitable methods, techniques and host organisms for displaying and screening (a set, collection or library of) nucleotide sequences encoding amino acid sequences (such as the single domain antibodies or polypeptide constructs) will be clear to the person skilled in the art, for example on the basis of the further disclosure herein. Reference is also made to the review by Hoogenboom in Nature Biotechnology, 23, 9, 1105-1116 (2005).

[0216] Further reference is made to the international application of Ablynx N.V. entitled “Amino acid sequences directed against HER2 and polypeptides comprising the same for the treatment of cancers and/or tumors”, which has a filing date of Nov. 27, 2008.

[0217] Methods according to the present invention further comprise step (iii) of screening the produced diversity of polypeptide constructs of step (ii) for a polypeptide construct having one or more, more particularly two or more desired characteristics. As detailed above, in particular embodiments, the methods involve screening the produced diversity of polypeptide constructs for a polypeptide construct which, in addition to its ability to recognize the antigen/epitope of interest, has one or more additional desired characteristics. These methods may or may not involve the screening for antigen-binding.

[0218] The methods of the present invention envisage obtaining a polypeptide construct which is a polypeptide construct (as defined herein) comprising at least two single domain antibodies (as defined herein), being directed against one or more antigens (as defined herein) and/or epitopes (as defined herein) and exhibiting one or more desired characteristics. It is envisaged that the methods of the present invention can be used for obtaining a polypeptide construct with any desired characteristic that can be screened for. Most typically in the methods of the invention, screening is done for one or more desired characteristics selected from (but not limited to) a suitable binding affinity, avidity, a suitable solubility, a suitable stability, suitable efficacy, a suitable potency and/or any appropriate combinations thereof. The suitable polypeptide construct is identified within the diversity of polypeptide constructs by screening the diversity of polypeptide constructs for one or more desired characteristics. The nature of the screening step(s) in the methods described herein is thus determined, at least in part, by the envisaged one or more desired characteristics of the polypeptide construct to be obtained.

[0219] In particular embodiments of the methods described herein, the one or more desired characteristics include a suitable affinity for the antigen and/or epitope.

[0220] The affinity, represented by the equilibrium constant for the dissociation of an antigen with an antigen-binding protein (K_{D}), is a measure for the binding strength between an antigenic determinant and an antigen-binding site on the antigen-binding molecule: the lesser the value of the K_{D}, the stronger the binding strength between an antigenic determinant and the antigen-binding molecule (alternatively, the affinity can also be expressed as the affinity constant (K_{A}), which is 1/K_{D}).

[0221] The “suitable” or desired affinity of a polypeptide construct obtained with the methods of the invention will be determined by its intended purpose. In particular embodiments it is envisaged that suitable affinity refers to the fact that the polypeptide construct binds to the one or more antigens and/or epitopes with a dissociation constant (K_{D}) of 10⁻⁵ to 10⁻¹² moles/liter or less, and preferably 10⁻⁷ to 10⁻¹² moles/liter or less and more preferably 10⁻⁸ to 10⁻¹² moles/liter (i.e. with an association constant (K_{A}) of 10⁵ to 10¹² liter/moles or more, and preferably 10⁷ to 10¹² liter/moles or more and more preferably 10⁸ to 10¹² liter/moles);

and/or such that the polypeptide construct:
[0222] binds to at least one of the one or more antigens or epitopes with a kₒₙ-rate of between 10² M⁻¹ s⁻¹ to about 10⁷ M⁻¹ s⁻¹, preferably between 10³ M⁻¹ s⁻¹ and 10⁷ M⁻¹ s⁻¹, more preferably between 10⁴ M⁻¹ s⁻¹ and 10⁷ M⁻¹ s⁻¹, such as between 10⁵ M⁻¹ s⁻¹ and 10⁷ M⁻¹ s⁻¹; and/or such that the polypeptide construct:
[0223] binds to at least one of the one or more antigens or epitopes with a k_{off} rate between 1 s⁻¹ (t_{1/2}=0.69 s) and 10⁻⁶ s⁻¹ (providing a near irreversible complex with a t_{1/2} of multiple days), preferably between 10² s⁻¹ and 10⁻⁶ s⁻¹, more preferably between 10⁻³ s⁻¹ and 10⁻⁶ s⁻¹, such as between 10⁻⁴ s⁻¹ and 10⁻⁶ s⁻¹.

[0224] In particular embodiments, where the methods of the invention envisage the generation of a polypeptide construct which is directed against two or more antigens and/or epitopes the screening for suitable affinity involves the screening of the diversity of polypeptide constructs for an affinity as described above for one, some or all of the antigens and/or epitopes against which the construct is intended to be directed.

[0225] Specific binding of an antigen-binding molecule to an antigen or antigenic determinant can be determined in any suitable manner known per se, including, for example, Scatchard analysis and/or (competitive) binding assays, such as radioimmunoassays (RIA), enzyme immunoassays (EIA) and sandwich (competition) assays, and the different variants thereof known per se in the art; as well as the other techniques mentioned herein.

[0226] The dissociation constant may be the actual or apparent dissociation constant, as will be clear to the skilled person. Methods for determining the dissociation constant will be clear to the skilled person, and for example include the techniques mentioned herein. In this respect, it will also be clear that it may not be possible to measure dissociation constants of more then 10⁻⁴ moles/liter or 10⁻³ moles/liter (e.g. of 10⁻² moles/liter). Optionally, as will also be clear to the skilled person, the (actual or apparent) dissociation constant may be calculated on the basis of the (actual or apparent) association constant (K_{A}), by means of the relationship [K_{D}=1/K_{A}].

[0227] The affinity denotes the strength or stability of a molecular interaction. The affinity is commonly given as by the K_{D}, or dissociation constant, which has units of mol/liter (or M). The affinity can also be expressed as an association constant, K_{A}, which equals 1/K_{D} and has units of (mol/liter)⁻¹ (or M⁻¹). In the present specification, the stability of the interaction between two molecules (such as a binding unit, e.g. a single domain antibody or a polypeptide construct of the invention and its intended target, antigen and/or epitope) will mainly be expressed in terms of the K_{D} value of their interaction; it being clear to the skilled person that in view of the relation K_{A}=1/K_{D}, specifying the strength of molecular interaction by its K_{D} value can also be used to calculate the corresponding K_{A} value. The K_{D}-value characterizes the strength of a molecular interaction also in a thermodynamic sense as it is related to the free energy (DG) of binding by the well known relation DG=RT·ln(K_{D}) (equivalently DG=−RT·ln(K_{A})), where R equals the gas constant, T equals the absolute temperature and in denotes the natural logarithm.

[0228] The K_{D} for biological interactions which are considered meaningful (e.g. specific) are typically in the range of 10⁻¹⁰ M (0.1 nM) to 10⁻⁵ M (10000 nM). The stronger an interaction is, the lower is its K_{D}.

[0229] The K_{D} can also be expressed as the ratio of the dissociation rate constant of a complex, denoted as k_{off}, to the rate of its association, denoted kₒₙ (so that K_{D}=k_{off}/kₒₙ and K_{A}=kₒₙ/k_{off}). The off-rate k_{off} has units s⁻¹ (where s is the SI unit notation of second). The on-rate kₒₙ has units M⁻¹ s⁻¹. The on-rate may vary between 10² M⁻¹ s⁻¹ to about 10⁷ M⁻¹ s⁻¹, approaching the diffusion-limited association rate constant for bimolecular interactions. The off-rate is related to the half-life of a given molecular interaction by the relation t_{1/2}=ln(2)/k_{off}. The off-rate may vary between 10⁻⁶ s⁻¹ (near irreversible complex with a t_{1/2} of multiple days) to 1 s⁻¹ (t_{1/2}=0.69 s).

[0230] The affinity of a polypeptide construct of the invention against one or more antigens and/or epitopes can be determined for example using the general techniques for measuring K_{D}. K_{A}, k_{off} or kₒₙ. The affinity of a molecular interaction between two molecules can be measured via different techniques known per se, such as the well known surface plasmon resonance (SPR) biosensor technique (see for example Ober et al., Intern. Immunology, 13, 1551-1559, 2001) where one molecule is immobilized on the biosensor chip and the other molecule is passed over the immobilized molecule under flow conditions yielding kₒₙ, k_{off} measurements and hence K_{D} (or K_{A}) values. This can for example be performed using the well-known BIACORE instruments.

[0231] It will also be clear to the skilled person that the measured K_{D} may correspond to the apparent K_{D} if the measuring process somehow influences the intrinsic binding affinity of the implied molecules for example by artifacts related to the coating on the biosensor of one molecule. Also, an apparent K_{D} may be measured if one molecule contains more than one recognition sites for the other molecule. In such situation the measured affinity may be affected by the avidity of the interaction by the two molecules.

[0232] Another approach that may be used to assess affinity is the 2-step ELISA (Enzyme-Linked Immunosorbent Assay) procedure of Friguet et al. (J. Immunol. Methods, 77, 305-19, 1985). This method establishes a solution phase binding equilibrium measurement and avoids possible artefacts relating to adsorption of one of the molecules on a support such as plastic.

[0233] However, the accurate measurement of K_{D} may be quite labour-intensive and as consequence, often apparent K_{D} values are determined to assess the binding strength of two molecules. It should be noted that as long as all measurements are made in a consistent way (e.g. keeping the assay conditions unchanged) apparent K_{D} measurements can be used as an approximation of the true K_{D} and hence in the present document K_{D} and apparent K_{D} should be treated with equal importance or relevance.

[0234] Finally, it should be noted that in many situations the experienced scientist may judge it to be convenient to determine the binding affinity relative to some reference molecule. For example, to assess the binding strength between molecules A and B, one may e.g. use a reference molecule C that is known to bind to B and that is suitably labelled with a fluorophore or chromophore group or other chemical moiety, such as biotin for easy detection in an ELISA or FACS (Fluorescent activated cell sorting) or other format (the fluorophore for fluorescence detection, the chromophore for light absorption detection, the biotin for streptavidin-mediated ELBA detection). Typically, the reference molecule C is kept at a fixed concentration and the concentration of A is varied for a given concentration or amount of B. As a result an IC₅₀ value is obtained corresponding to the concentration of A at which the signal measured for C in absence of A is halved. Provided K_{D ref}, the K_{D} of the reference molecule, is known, as well as the total concentration c_{ref} of the reference molecule, the apparent K_{D} for the interaction A-B can be obtained from following formula: K_{D}=IC₅₀/(1+c_{ref}/K_{D ref}). Note that if c_{ref}<<K_{D ref}, K_{D}≈IC₅₀. Provided the measurement of the IC₅₀ is performed in a consistent way (e.g. keeping c_{ref} fixed) for the binders that are compared, the strength or stability of a molecular interaction can be assessed by the IC₅₀ and this measurement is judged as equivalent to K_{D} or to apparent K_{D} throughout this text.

[0235] In proteins, avidity is a term used to describe the combined strength of multiple bond interactions. Avidity is distinct from affinity, which is a term used to describe the strength of a single bond. As such, avidity is the combined synergistic strength of bond affinities rather than the sum of bonds. It is commonly applied to antibody interaction, where multiple, weak, non-covalent bonds form between antigen and antibody. Individually, each bond is quite readily broken, however when many are present at the same time, the overall effect results in synergistic, strong binding of antigen to antibody.

[0236] In the context of the present invention, the avidity of a polypeptide construct is referred to as the combined strength of bond affinities in the complex formed between the polypeptide construct and its antigen. This combined strength of bond affinities is obtained by the binding of each individual single domain antibody in the polypeptide construct to its respective epitope on the antigen.

[0237] In particular embodiments, the methods of the present invention are aimed at obtaining a polypeptide construct having a suitable solubility and the methods of the invention involve screening the diversity of polypeptide constructs for polypeptide constructs with a suitable solubility. Suitable solubility values of polypeptide constructs obtainable by the methods of the present invention will be determined by their intended use or purpose and will be clear to the skilled person based on the common general knowledge and the prior art as cited herein. Without being limiting, the polypeptide constructs obtained with the method of the invention may have a solubility from 5 to 500 mg per ml, more preferably from 10 to 250 mg per ml, even more preferably from 50 to 200 mg per ml, such as around 20 mg per ml, 50 mg per ml, 100 mg per ml or 150 mg per ml. With regard to measuring or determining the solubility of the polypeptide constructs obtainable according to the methods of the present invention, suitable methods are available in the art (e.g. solubility can be measured in a the dilution method, by concentration of the polypeptide construct until precipitation of the polypeptide construct occurs, e.g. via an ultrafiltration membrane (via centrifugation or via crossflow filtration); or can be measured indirectly e.g. by addition of agents such as PEG) and will be clear to the skilled person.

[0238] In particular embodiments, the methods of the present invention are aimed at obtaining a polypeptide construct having a suitable stability and the methods of the invention involve screening the diversity of polypeptide constructs for polypeptide constructs with a suitable stability. The desired stability of a polypeptide construct will be determined by its intended purpose. More particularly with regard to stability, it is envisaged that a polypeptide construct may be considered to have a suitable stability where it has a suitable half-life for its intended purpose (e.g. for use as a human or animal therapeutic).

[0239] In particular embodiments it is envisaged that suitable stability refers to the fact that the polypeptide construct has a suitable half-life. The “half-life” of a polypeptide construct of the invention can generally be defined as the time taken for the serum concentration of the polypeptide construct to be reduced by 50%, in vivo, for example due to degradation of the polypeptide construct and/or clearance or sequestration of the polypeptide construct by natural mechanisms. Suitable half-life values may be a half-life that is at least 1.5 times, preferably at least 2 times, such as at least 5 times, for example at least 10 times or more than 20 times, greater than the half-life of the selected template polypeptide construct per se. For example, the polypeptide construct of the invention with increased half-life may have a half-life that is increased with more than 1 hours, preferably more than 2 hours, more preferably more than 6 hours, such as more than 12 hours, or even more than 24, 48 or 72 hours, compared to the selected template polypeptide construct per se. For example, a polypeptide construct having a suitable stability according to the invention may have a half-life of at least 5 days (such as about 5 to 10 days), preferably at least 9 days (such as about 9 to 14 days), more preferably at least about 10 days (such as about 10 to 15 days), or at least about 11 days (such as about 11 to 16 days), more preferably at least about 12 days (such as about 12 to 18 days or more), or more than 14 days (such as about 14 to 19 days).

[0240] Accordingly, in particular embodiments, the screening step of the method according to the present invention encompasses determining the in vivo half-life of the diversity of polypeptide constructs of the invention. The in vivo half-life of polypeptide construct of the invention can be determined in any manner known per se, such as by pharmacokinetic analysis. Suitable techniques will be clear to the person skilled in the art, and may for example generally involve the steps of suitably administering to a warm-blooded animal (i.e. to a human or to another suitable mammal, such as a mouse, rabbit, rat, pig, dog or a primate, for example monkeys from the genus Macaca (such as, and in particular, cynomologus monkeys (Macaca fascicularis) and/or rhesus monkeys (Macaca mulatta) and baboon (Papio ursinus)) a suitable dose of the polypeptide construct of the invention; collecting blood samples or other samples from said animal; determining the level or concentration of the polypeptide construct of the invention in said blood sample; and calculating, from (a plot of) the data thus obtained, the time until the level or concentration of the amino acid sequence, compound or polypeptide of the invention has been reduced by 50% compared to the initial level upon dosing. Reference is for example made to the Experimental Part below, as well as to the standard handbooks, such as Kenneth, A et al: Chemical Stability of Pharmaceuticals: A Handbook for Pharmacists and Peters et al, Pharmacokinete analysis: A Practical Approach (1996). Reference is also made to “Pharmacokinetics”, M Gibaldi & D Perron, published by Marcel Dekker, 2nd Rev. edition (1982). As will also be clear to the skilled person (see for example pages 6 and 7 of WO 04/003019 and in the further references cited therein), the half-life can be expressed using parameters such as the t1/2-alpha, t1/2-beta and the area under the curve (AUC). In the present specification, an “increase in half-life” refers to an increase in any one of these parameters, such as any two of these parameters, or essentially all three these parameters. As used herein “increase in half-life” or “increased half-life” in particular refers to an increase in the t1/2-beta, either with or without an increase in the t1/2-alpha and/or the AUC or both.

[0241] In further particular embodiments, the screening methods of the present invention may comprise determining certain characteristics (such as the conformation, binding, activity, molecular weight, amino acid sequence, etc.) of the polypeptide constructs after or during exposure to one or more specific (such as e.g. denaturing condition, presence of acids, presence of basics, presence of guanidinium chloride, presence of urea, high or low temperature, high or low pressure, shear, certain time, presence of certain human tissues (such as e.g. lung tissue, liver tissue, etc.) or fluids (such as e.g. saliva, mucus, BAL, blood, urine, gastric juice, etc.), etc.) conditions.

[0242] In further particular embodiments, the screening methods of the present invention may comprise determining the expression level of the polypeptide constructs under specified growth and/or inducing conditions. Suitable expression levels for the polypeptide constructs are defined by their intended use or purpose and will be clear to the skilled person based on the common general knowledge and the prior art as cited herein.

[0243] In particular embodiments the methods of the present invention are aimed at generating a polypeptide construct having a suitable efficacy (in a particular assay or model) and the methods of the invention involve screening the diversity of polypeptide constructs to determine for polypeptide constructs that display a suitable efficacy. A suitable efficacy value of polypeptide constructs will be determined by the intended use or purpose and will be clear to the skilled person based on the common general knowledge and the prior art as cited herein. With regard to measuring or determining the efficacy of the polypeptide constructs obtainable according to the methods of the present invention, polypeptide constructs of the invention can be tested using any suitable in vitro assay, cell-based assay, in vivo assay and/or animal model known per se, or any combination thereof, depending on the intended use or purpose of the polypeptide construct. The selection of a suitable assay for use in the screening step will be determined by e.g. the antigen(s) and/or epitope(s) that should be bound by the polypeptide construct of the invention, by the specific (therapeutic) activity (such as e.g. blocking of receptor/ligand binding; inhibition of enzymatic activity; competing with and/or blocking a reference antibody; modulating certain signalling pathways; inducing apoptosis; etc.) the polypeptide construct of the invention should have, etc. Based on the knowledge of the desired characteristics of the polypeptide construct of the invention, suitable assays and animal models will be clear to the skilled person, and for example include the assays and animal models used in the experimental part below and in the prior art cited herein.

[0244] In particular embodiments the methods of the present invention are aimed at generating a polypeptide construct having a suitable potency and the methods of the invention involve screening a diversity of polypeptide constructs obtained according to methods described herein for polypeptide constructs that display a suitable potency. More particularly, suitable potency values of polypeptide constructs will be determined by their intended use or purpose and will be clear to the skilled person based on the common general knowledge and the prior art as cited herein. With regard to measuring or determining the potency of the polypeptide constructs of the present invention, these can generally be tested using any suitable in vitro potency assay, cell-based potency assay, in vivo potency assay and/or animal model known per se, or any combination thereof, depending on the intended use or purpose of the polypeptide construct. Suitable potency assays and animal models will be clear to the skilled person, and for example include the potency assays and animal models used in the experimental part below and in the prior art cited herein.

[0245] Methods according to the present invention allow the identification, from a diversity of polypeptide constructs, of specific (candidate) polypeptide constructs having one or more desired characteristics, which specific (candidate) polypeptide constructs are either directed against one antigen (whereby the polypeptide constructs may specifically bind to one or more epitopes thereof) or against different antigens (whereby the polypeptide construct may potentially specifically hind to one or more epitopes of each of the different antigens). Thus, the methods of the present invention are not limited to or defined by specific antigenic determinants, epitopes, parts, domains, subunits or conformations (where applicable) of the antigens against which the polypeptide constructs of the invention are directed. For example, the polypeptide constructs of the invention may or may not be directed against an “interaction site” (as defined herein). However, it is generally assumed and preferred that the polypeptide constructs of the invention are preferably directed against an interaction site (as defined herein).

[0246] Also, polypeptide constructs according to the invention contain one or more binding units consisting of single domain antibodies that are directed against one or more antigens or epitopes. Generally, such polypeptide constructs will bind to said one or more antigens or epitopes with increased avidity (as defined herein) compared to the binding unit consisting of a single domain antibody. Such a polypeptide construct may for example comprise two single domain antibodies that are directed against the same antigenic determinant, epitope, part, domain, subunit or conformation (where applicable) of an antigen (which may or may not be an interaction site); or comprise at least one “first” single domain antibody that is directed against a first antigenic determinant, epitope, part, domain, subunit or conformation (where applicable) of an antigen (which may or may not be an interaction site); and at least one “second” single domain antibody that is directed against a second antigenic determinant, epitope, part, domain, subunit or conformation (where applicable) different from the first (and which again may or may not be an interaction site). Preferably, in such “biparatopic” polypeptide constructs of the invention, at least one single domain antibody is directed against an interaction site (as defined herein), although the invention in its broadest sense is not limited thereto.

[0247] Also, when the antigen is part of a binding pair (for example, a receptor-ligand binding pair), the polypeptide constructs of the invention may be such that they compete with the cognate binding partner (e.g. the ligand, receptor or other binding partner, as applicable) for binding to the antigen, and/or such that they (fully or partially) neutralize binding of the binding partner to the antigen. Methods and assays for polypeptide constructs that compete with a cognate binding part and/or that neutralize binding of the binding partner will be clear to the skilled person based on the common general knowledge and the available prior art.

[0248] It is also within the scope of the invention that, where applicable, a polypeptide construct of the invention can bind to two or more antigenic determinants, epitopes, parts, domains, subunits or conformations of the same antigen. In such a case, said antigenic determinants, epitopes, parts, domains or subunits may be essentially the same (for example, if said antigen contains repeated structural motifs or occurs in a multimeric form) or may be different (and in the latter case, the polypeptide constructs of the invention may bind to such different antigenic determinants, epitopes, parts, domains, subunits of said antigen with an affinity and/or specificity which may be the same or different). Also, for example, when said antigen exists in an activated conformation and in an inactive conformation, the polypeptide constructs of the invention may bind to either one of these conformations, or may bind to both these conformations (i.e. with an affinity and/or specificity which may be the same or different). Also, for example, the polypeptide constructs of the invention may bind to a conformation of an antigen in which it is bound to a pertinent ligand, may bind to a conformation of an antigen in which it not bound to a pertinent ligand, or may bind to both such conformations (again with an affinity and/or specificity which may be the same or different). (all depending on the desired characteristics of the polypeptide construct of the invention). Methods and assays for screening for polypeptide constructs that bind one or more specific conformations of an antigen will be clear to the skilled person based on the common general knowledge and the available prior art.

[0249] It is also expected that the polypeptide constructs of the invention will generally bind to all naturally occurring or synthetic analogs, variants, mutants, alleles, parts and fragments of said antigen; or at least to those analogs, variants, mutants, alleles, parts and fragments of said antigen that contain one or more antigenic determinants or epitopes that are essentially the same as the antigenic determinant(s) or epitope(s) to which the polypeptide constructs of the invention bind in the wild-type of said antigen. Again, in such a case, the polypeptide constructs of the invention may bind to such analogs, variants, mutants, alleles, parts and fragments with an affinity and/or specificity that are the same as, or that are different from (i.e. higher than or lower than), the affinity and specificity with which the polypeptide constructs of the invention bind to (wild-type) antigen. It is also included within the scope of the invention that the polypeptide constructs of the invention bind to some analogs, variants, mutants, alleles, parts and fragments of said antigen, but not to others. (all depending on the desired characteristics of the polypeptide construct of the invention). Methods and assays for screening for polypeptide constructs that bind one or more analogs, variants, mutants, alleles, parts and fragments of an antigen will be clear to the skilled person based on the common general knowledge and the available prior art.

[0250] When said antigen exists in a monomeric form and in one or more multimeric forms, it is within the scope of the invention that the polypeptide constructs of the invention only bind to said antigen in monomeric form, only bind to an antigen in multimeric form, or bind to both the monomeric and the multimeric form. Again, in such a case, the polypeptide constructs of the invention may bind to the monomeric form with an affinity and/or specificity that are the same as, or that are different from (i.e. higher than or lower than), the affinity and specificity with which the polypeptide constructs of the invention bind to the multimeric form. (all depending on the desired characteristics of the polypeptide construct of the invention). Methods and assays for screening for polypeptide constructs that bind one or more forms (monomeric or multimeric) of an antigen will be clear to the skilled person based on the common general knowledge and the available prior art.

[0251] Also, when said antigen can associate with other proteins or polypeptides to form protein complexes (e.g. with multiple subunits), it is within the scope of the invention that the polypeptide constructs of the invention bind to said antigen in its non-associated state, bind to said antigen in its associated state, or bind to both. In all these cases, the polypeptide constructs of the invention may bind to such multimers or associated protein complexes with an affinity and/or specificity that may be the same as or different from (i.e. higher than or lower than) the affinity and/or specificity with which the polypeptide constructs of the invention bind to said antigen in its monomeric and non-associated state. (all depending on the desired characteristics of the polypeptide construct of the invention). Methods and assays for screening for polypeptide constructs that bind one or more forms (monomeric or multimeric) of an antigen will be clear to the skilled person based on the common general knowledge and the available prior art.

[0252] In one aspect of the invention, the method described herein can be used to screen for and so provide a polypeptide construct that is directed against a heterodimeric protein, polypeptide, ligand or receptor.

[0253] In this aspect of the invention, the polypeptide construct that is screened for and so obtained will at least comprise at least a first (single) domain antibody and/or Nanobody that is directed against a first subunit of said heterodimeric protein, polypeptide, ligand or receptor, and at least a second (single) domain antibody and/or Nanobody that is directed against a second subunit of said heterodimeric protein, polypeptide, ligand or receptor, different from the first subunit.

[0254] Accordingly, the diversity, collection, library or set of polypeptide constructs that is used in the screening step (for example, the structural variants of the selected template) will be a collection of such polypeptide constructs in which each polypeptide construct comprises a first (single) domain antibody and/or Nanobody that is directed against a first subunit of said heterodimeric protein, polypeptide, ligand or receptor, and at least a second (single) domain antibody and/or Nanobody that is directed against a second subunit of said heterodimeric protein, polypeptide, ligand or receptor.

[0255] For example, it may be that the diversity, collection, library or set of polypeptide constructs comprises a set of polypeptide constructs that each share the same first (single) domain antibody and/or Nanobody (i.e. for binding to the first subunit), but in which the second (single) domain antibody (i.e. for binding to the second subunit) may differ between the different polypeptides that form the diversity, collection, library or set (or visa versa), for example in that these second (single) domain antibodies (each) have different amino acid sequences, are humanized variants of each other, are variants of each other that have been prepared and/or obtained through affinity maturation techniques (and/or as part of and/or for the purposes of affinity maturation of the original template sequence), and/or are single domain antibodies that bind to different epitopes on the second subunit; or any suitable combination thereof.

[0256] It may also be that the diversity, collection, library or set of polypeptide constructs differ in both the first and/or the second (single) domain antibody, in which both the first and/or the second (single) domain antibody, respectively, that are present in a specific polypeptide construct (i.e. that forms part of the diversity, collection, library or set that is used for screening) may again differ from the first and/or the second (single) domain antibodies, respectively, that are present in the other polypeptides from the diversity, collection, library or set in that they have different amino acid sequences, are humanized variants of each other, are variants of each other that have been prepared and/or obtained through affinity maturation techniques (and/or as part of and/or for the purposes of affinity maturation of the original template sequence), and/or are single domain antibodies that bind to different epitopes on the first and second subunit, respectively; or any suitable combination of the foregoing.

[0257] The heterodimeric protein, polypeptide, ligand or receptor may be any suitable, desired and/or intended heterodimeric protein, and may for example be a heterodimeric cytokine such as IL-12 (which consists of a p35 and a p40 subunit), IL-23 (which consists of a p19 and a p40 subunit), IL-27 (which consists of an EBI-3 and p28 subunit) or IL-35 (which consists of a p35 subunit and an EBI-3 subunit). The heterodimeric protein, polypeptide, ligand or receptor may also be a heterodimeric receptor, such as a heterodimeric receptor for a (heterodimeric) cytokine, such as the cognate receptors for IL-12, IL-23, IL-27 and/or IL-35. Further reference is made to the international application of Ablynx N.V. entitled “Amino acid sequences directed against heterodimeric cytokines and/or their receptors and polypeptides comprising the same”, which has a filing date of Nov. 27, 2008. This application also contains some examples of multispecific polypeptide constructs that comprise at least one single domain antibody or Nanobody against a first subunit of a heterodimeric cytokine and at least one single domain antibody or Nanobody against a second subunit of a heterodimeric cytokine different from said first subunit (see for example FIG. 33 for p19/p40 constructs and FIG. 36 for p35/p40 constructs). It is envisaged that these and similar polypeptides may be used as templates for the methods described herein and/or that the methods described herein may be used to provide similar polypeptides (i.e. through screening of a suitable diversity, collection, library or set, as described herein).

[0258] It will also be clear that in this aspect of the invention, the diversity, collection, library or set may be screened against a group, variety, set or family of related heterodimeric proteins, polypeptides, ligands or receptors (for example, sharing a common subunit and/or belonging to the same family, such as a family that shares similar subunits), in order to screen for the polypeptides that have the optimal or desired specificity for one particular heterodimeric protein, polypeptide, ligand or receptor within said group, variety, set or family of related heterodimeric proteins, polypeptides, ligands or receptors. As a non-limiting example, a diversity, collection, library or set of polypeptides of “p19/p40 constructs”, “p35/p40 constructs” or similar multispecific constructs that are directed against a heterodimeric cytokine or a cognate receptor for the same (as generally described in the international application of Ablynx N.V. entitled “Amino acid sequences directed against heterodimeric cytokines and/or their receptors and polypeptides comprising the same”) may be screened for specificity for one of IL-12, IL-23, IL-27 and/or IL-35 compared to one or more of the other heterodimeric cytokines belonging to this family (for example, p19/p40 constructs may be screened for specificity for IL-23 compared to IL-12, IL-27 and/or IL-35. Similarly, p35/p40 constructs may be screened for specificity for IL-12 compared to IL-23, IL-27 and/or IL-35). Such screening methods, and a diversity, collection, library or set that is designed for, (to be) used in and/or intended for use in such a screening method, form further aspects of this invention.

[0259] Also, as will be clear to the skilled person, polypeptide constructs that contain two or more single domain antibodies directed against said antigen may bind with higher avidity to said antigen than the corresponding monomeric amino acid sequence(s). For example, and without limitation, polypeptide constructs that contain two or more single domain antibodies directed against different epitopes of said antigen may (and usually will) bind with higher avidity than each of the individual single domain antibodies, and polypeptide constructs that contain two or more single domain antibodies directed against said antigen may (and usually will) bind also with higher avidity to a multimer of said antigen.

[0260] Generally, polypeptide constructs of the invention will at least bind to those forms of said antigen (including monomeric, multimeric and associated forms) that are the most relevant from a biological and/or therapeutic point of view, as will be clear to the skilled person.

[0261] The present invention relates to methods for obtaining polypeptide constructs comprising two or more single domain antibodies. In particular embodiments polypeptide constructs according to the invention may comprise at least two single domain antibodies which are selected from the group of domain antibodies (or an amino acid sequence that is suitable for use as a domain antibody), “dAbs” (or an amino acid sequence that is suitable for use as a dAb), Nanobodies®, V_{HH} sequences (as defined herein, and including but not limited to a V_{HH} sequence) and/or other single variable domains or combinations thereof. For instance, a polypeptide construct according to the present invention comprising at least two single domain antibodies may comprise V_{H} domains and/or V_{L} domains (both derived from conventional four-chain antibodies) and/or V_{HH} domains (derived from heavy chain antibodies). It is however preferred that in a polypeptide construct of the present invention comprising at least two single domain antibodies, said at least two single domain antibodies exclusively consist of only one type of domain antibodies (i.e. corresponding to either heavy or light chain domains). Most particularly it is envisaged that in the methods of the present invention polypeptide constructs are obtained wherein the at least two single domains exclusively consist of Nanobodies® or heavy chain domain antibodies (e.g. V_{H} or V_{HH}). Further particular embodiments of the invention involve methods wherein the polypeptide constructs obtained comprise at least two single domains, whereby the single domains of the construct consist exclusively of (humanized) V_{HH} domains or exclusively consist of heavy chain variable domains derived from heavy chain antibodies.

[0262] The polypeptide constructs of the invention can generally be prepared by a method which comprises at least the step of suitably linking the one or more binding units essentially consisting of single domain antibodies to each other and to the one or more other groups, residues, moieties or binding units, optionally via the one or more suitable linkers, so as to provide the polypeptide construct of the invention. Polypeptide constructs of the invention can also be prepared by a method which generally comprises at least the steps of providing a nucleic acid that encodes a polypeptide construct of the invention, expressing said nucleic acid in a suitable manner, and recovering the expressed polypeptide construct of the invention. Such methods can be performed in a manner known per se, which will be clear to the skilled person, for example on the basis of the methods and techniques further described herein.

[0263] It will also be clear to the skilled person that the method of the invention can equally be preformed at the nucleic acid level as well as at the amino acid level. Thus, the method of the invention can equally be preformed by screening a diversity, set, collection or library of nucleic acid sequences encoding a diversity, set, collection or library of single domain antibodies or encoding a diversity, set, collection or library of polypeptide construct as well as by screening a set, collection or library of single domain antibodies or a diversity, set, collection or library of polypeptide construct.

[0264] The process of selecting and/or preparing a polypeptide construct of the invention, starting from one or more binding units consisting essentially of single domain antibodies, is also referred to herein as “formatting” said single domain antibodies; and a single domain antibody that is made part of a polypeptide construct of the invention is said to be “formatted” or to be “in the format of” said polypeptide construct of the invention. Examples of ways in which a single domain antibody can be formatted and examples of such formats will be clear to the skilled person based on the disclosure herein; and such formatted single domain antibodies form a further aspect of the invention.

[0265] Generally, polypeptide constructs of the invention that comprise at least two single domain antibodies will be referred to herein as “multivalent” polypeptide constructs (as defined herein).

[0266] More specifically, a polypeptide constructs comprising at least two single domain antibodies that are directed against two or more different antigens are referred to herein as “multispecific” polypeptide constructs (as defined herein).

[0267] The methods of the present invention are directed at obtaining polypeptide constructs comprising two or more single domain antibodies. Such a single domain antibody may be a domain antibody (or an amino acid sequence that is suitable for use as a domain antibody), a single domain antibody (or an amino acid sequence that is suitable for use as a single domain antibody), a “dAb” (or an amino acid sequence that is suitable for use as a dAb) or a Nanobody® (as defined herein, and including but not limited to a V_{HH} sequence), other single variable domains, or any suitable fragment of any one thereof.

[0268] For a general description of heavy chain antibodies and the variable domains thereof, reference is inter alia made to the prior art cited herein, to the review article by Muyldermans in Reviews in Molecular Biotechnology 74 (2001), 277-302; as well as to the following patent applications, which are mentioned as general background art: WO 94/04678, WO 95/04079 and WO 96/34103 of the Vrije Universiteit Brussel; WO 94/25591, WO 99/37681, WO 00/40968, WO 00/43507, WO 00/65057, WO 01/40310, WO 01/44301, EP 1134231 and WO 02/48193 of Unilever; WO 97/49805, WO 01/21817, WO 03/035694, WO 03/054016 and WO 03/055527 of the Vlaams Instituut voor Biotechnologie (VIB); WO 03/050531 of Algonomics N.V. and Ablynx N.V.; WO 01/90190 by the National Research Council of Canada; WO 03/025020 (=EP 1 433 793) by the Institute of Antibodies; as well as WO 04/041867, WO 04/041862, WO 04/041865, WO 04/041863, WO 04/062551, WO 05/044858, WO 06/40153, WO 06/079372, WO 06/122786, WO 06/122787 and WO 06/122825, by Ablynx N.V. and the further published patent applications by Ablynx N.V. Reference is also made to the further prior art mentioned in these applications, and in particular to the list of references mentioned on pages 41-43 of the International application WO 06/040153, which list and references are incorporated herein by reference.

[0269] For a general description of (single) domain antibodies, reference is for example made to EP 0 368 684. For the term “dAb's”, reference is for example made to Ward et al. (Nature 1989 Oct. 12; 341 (6242): 544-6), to Holt et al., Trends Biotechnol., 2003, 21(10:484-490; as well as to for example WO 06/030220, WO 06/003388 and other published patent applications of Domantis Ltd.

[0270] It should also be noted that, although less preferred in the context of the present invention because they are not of mammalian origin, (single) domain antibodies or single variable domains can be derived from certain species of shark (for example, the so-called “IgNAR domains”, see for example WO 05/18629).

[0271] In particular, a (single) domain antibody may be a Nanobody® (as defined herein) or a suitable fragment thereof [Note: Nanobody®, Nanobodies® and Nanoclone® are registered trademarks of Ablynx N.V.]. For a general description of Nanobodies, reference is made to the further description below, as well as to the prior art cited herein (such as WO 06/040153, WO 06/122825, WO 06/122786, WO 07/042,289, WO 07/104,529, WO 08/020,079, WO 08/074,839, WO 08/071,447, WO 08/074,840, WO 08/074,867, WO 08/077,945, WO 08/101,985 by Ablynx N.V. Further reference is made to the international application of Ablynx N.V. entitled “Amino acid sequences directed against HER2 and polypeptides comprising the same for the treatment of cancers and/or tumors”, which has a filing date of Nov. 27, 2008. In this respect, it should however be noted that this description and the prior art mainly described. Nanobodies of the so-called “V_{H}3 class” (i.e. Nanobodies with a high degree of sequence homology to human germline sequences of the V_{H}3 class such as DP-47, DP-51 or DP-29), which Nanobodies form a preferred aspect of this invention. It should however be noted that the invention in its broadest sense generally covers any type of Nanobody, and for example also covers the Nanobodies belonging to the so-called “V_{H}4 class” (i.e. Nanobodies with a high degree of sequence homology to human germline sequences of the V_{H}4 class such as DP-78), as for example described in WO 07/118,670.

[0272] According to particular embodiment, in the methods of the invention polypeptide constructs are obtained comprising two or more Nanobodies or V_{HH} sequences. Generally, Nanobodies (in particular V_{HH} sequences and partially humanized Nanobodies) can in particular be characterized by the presence of one or more “Hallmark residues” (as described herein) in one or more of the framework sequences (again as further described herein).

[0273] Thus, generally, a Nanobody can be defined as an amino acid sequence with the (general) structure
[0274] FR1-CDR1-FR2-CDR2-FR3-CDR3-FR4
   in which FR1 to FR4 refer to framework regions 1 to 4, respectively, and in which CDR1 to CDR3 refer to the complementarity determining regions 1 to 3, respectively, and in which one or more of the Hallmark residues are as further defined herein.

[0275] In particular, a Nanobody can be an amino acid sequence with the (general) structure
[0276] FR1-CDR1-FR2-CDR2-FR3-CDR3-FR4
   in which FR1 to FR4 refer to framework regions 1 to 4, respectively, and in which CDR1 to CDR3 refer to the complementarity determining regions 1 to 3, respectively, and in which the framework sequences are as further defined herein.

[0277] The amino acid residues of a Nanobody are numbered according to the general numbering for V_{H} domains given by Kabat et al. (“Sequence of proteins of immunological interest”, US Public Health Services, NIH Bethesda, Md., Publication No. 91), as applied to V_{HH} domains from Camelids in the article of Riechmann and Muyldermans, J. Immunol. Methods 2000 Jun. 23; 240 (1-2): 185-195 (see for example FIG. 2 of this publication); or referred to herein. According to this numbering, FR1 of a Nanobody comprises the amino acid residues at positions 1-30, CDR1 of a Nanobody comprises the amino acid residues at positions 31-35, FR2 of a Nanobody comprises the amino acids at positions 36-49, CDR2 of a Nanobody comprises the amino acid residues at positions 50-65, FR3 of a Nanobody comprises the amino acid residues at positions 66-94, CDR3 of a Nanobody comprises the amino acid residues at positions 95-102, and FR4 of a Nanobody comprises the amino acid residues at positions 103-113. In this respect, it should be noted that—as is well known in the art for V_{H} domains and for V_{HH} domains—the total number of amino acid residues in each of the CDR's may vary and may not correspond to the total number of amino acid residues indicated by the Kabat numbering (that is, one or more positions according to the Kabat numbering may not be occupied in the actual sequence, or the actual sequence may contain more amino acid residues than the number allowed for by the Kabat numbering). This means that, generally, the numbering according to Kabat may or may not correspond to the actual numbering of the amino acid residues in the actual sequence. Generally, however, it can be said that, according to the numbering of Kabat and irrespective of the number of amino acid residues in the CDR's, position 1 according to the Kabat numbering corresponds to the start of FR1 and vice versa, position 36 according to the Kabat numbering corresponds to the start of FR2 and vice versa, position 66 according to the Kabat numbering corresponds to the start of FR3 and vice versa, and position 103 according to the Kabat numbering corresponds to the start of FR4 and vice versa.

[0278] Alternative methods for numbering the amino acid residues of V_{H} domains, which methods can also be applied in an analogous manner to V_{HH} domains from Camelids and to Nanobodies, are the method described by Chothia et al. (Nature 342, 877-883 (1989)), the so-called “AbM definition” and the so-called “contact definition”. However, in the present description, claims and figures, the numbering according to Kabat as applied to V_{HH} domains by Riechmann and Muyldermans will be followed, unless indicated otherwise.

[0279] More in particular, a Nanobody can be an amino acid sequence with the (general) structure
[0280] FR1-CDR1-FR2-CDR2-FR3-CDR3-FR4
   in which FR1 to FR4 refer to framework regions 1 to 4, respectively, and in which CDR1 to CDR3 refer to the complementarity determining regions 1 to 3, respectively, and in which preferably one or more of the amino acid residues at positions 11, 37, 44, 45, 47, 83, 84, 103, 104 and 108 according to the Kabat numbering are chosen from the Hallmark residues mentioned in Table A-1 below;

[0281] Nanobodies may be derived in any suitable manner and from any suitable source, and may for example be naturally occurring V_{HH} sequences (i.e. from a suitable species of Camelid) or synthetic or semi-synthetic amino acid sequences, including but not limited to “humanized” (as defined herein) Nanobodies, “camelized” (as defined herein) immunoglobulin sequences (and in particular camelized heavy chain variable domain sequences), as well as Nanobodies that have been obtained by techniques such as affinity maturation (for example, starting from synthetic, random or naturally occurring immunoglobulin sequences), CDR grafting, veneering, combining fragments derived from different immunoglobulin sequences, PCR assembly using overlapping primers, and similar techniques for engineering immunoglobulin sequences well known to the skilled person; or any suitable combination of any of the foregoing as further described herein.

[0282] Also, when a Nanobody comprises a V_{HH} sequence, said Nanobody may be suitably humanized so as to provide one or more further (partially or fully) humanized Nanobodies of the invention. Similarly, when a Nanobody comprises a synthetic or semi-synthetic sequence (such as a partially humanized sequence), said Nanobody may optionally be further suitably humanized, e.g. by the methods of the present invention, again so as to provide one or more further (partially or fully) humanized Nanobodies of the invention.

[0283] Nanobodies of the invention can generally be obtained by any of the techniques (1) to (8) mentioned on pages 61 and 62 of WO 08/020,079, or any other suitable technique known per se. One preferred class of Nanobodies corresponds to the V_{HH} domains of naturally occurring heavy chain antibodies. Such V_{HH} sequences can generally be generated or obtained by suitably immunizing a species of Camelid with a particular antigen or target (i.e. so as to raise an immune response and/or heavy chain antibodies directed against said antigen or target), by obtaining a suitable biological sample from said Camelid (such as a blood sample, serum sample or sample of B-cells), and by generating V_{HH} sequences directed against said antigen or target, starting from said sample, using any suitable technique known per se. Such techniques will be clear to the skilled person and/or are described herein.

[0284] The total number of amino acid residues in a Nanobody can be in the region of 110-120., is preferably 112-115, and is most preferably 113. It should however be noted that parts, fragments, analogs or derivatives (as further described herein) of a Nanobody are not particularly limited as to their length and/or size, as long as such parts, fragments, analogs or derivatives meet the further requirements outlined herein and are also preferably suitable for the purposes described herein.

TABLE A-1
Hallmark Residues in Nanobodies

| Position | Human V_{H}3 | Hallmark Residues |
|---|---|---|
| 11 | L, V; | L, S, V, M, W, F, T, Q, E, A, R, G, K, Y, |
| | predominantly L | N, P, I; preferably L |
| 37 | V, I, F; usually V | F⁽¹⁾, Y, V, L, A, H, S, I, W, C, N, G, D, T, |
| | | P, preferably F⁽¹⁾ or Y |
| 44⁽⁸⁾ | G | E⁽³⁾, Q⁽³⁾, G⁽²⁾, D, A, K, R, L, P, S, V, H, T, |
| | | N, W, M, I; preferably G⁽²⁾, E⁽³⁾ or Q⁽³⁾; |
| | | most preferably G⁽²⁾ or Q⁽³⁾. |
| 45⁽⁸⁾ | L | L⁽²⁾, R⁽³⁾, P, H, F, G, Q, S, E, T, Y, C, I, D, |
| | | V; preferably L⁽²⁾ or R⁽³⁾ |
| 47⁽⁸⁾ | W, Y | F⁽¹⁾, L⁽¹⁾ or W⁽²⁾ G, I, S, A, V, M, R, Y, E, |
| | | P, T, C, H, K, Q, N, D: preferably W⁽²⁾, |
| | | L⁽¹⁾ or F⁽¹⁾ |
| 83 | R or K; usually R | R, K⁽⁵⁾, T, E⁽⁵⁾, Q, N, S, I, V, G, M, L, A, |
| | | D, Y, H; preferably K or R; most |
| | | preferably K |
| 84 | A, T, D; | P⁽⁵⁾, S, H, L, A, V, I, T, F, D, R, Y, N, Q, |
| | predominantly A | G, E; preferably P |
| 103 | W | W⁽⁴⁾, R⁽⁶⁾, G, S, K, A, M, Y, L, F, T, N, V, |
| | | Q, P⁽⁶⁾, E, C; preferably W |
| 104 | G | G, A, S, T, D, P, N, E, C, L; preferably G |
| 108 | L, M or T; | Q, L⁽⁷⁾, R, P, E, K, S, T, M, A, H; |
| | predominantly L | preferably Q or L⁽⁷⁾ |

Notes:
⁽¹⁾In particular, but not exclusively, in combination with KERE or KQRE at positions 43-46.
⁽²⁾Usually as GLEW at positions 44-47.
⁽³⁾Usually as KERE or KQRE at positions 43-46, e.g. as KEREL, KEREF, KQREL_{;} KQREF, KEREG, KQREW or KQREG at positions 43-47. Alternatively, also sequences such as TERE (for example TEREL), TQRE (for example TQREL), KECE (for example KECEL or KECER), KQCE (for example KQCEL), RERE (for example REREG), RQRE (for example RQREL, RQREF or RQREW), QERE (for example QEREG), QQRE, (for example QQREW, QQREL or QQREF), KGRE (for example KGREG), KDRE (for example KDREV) are possible. Some other possible, but less preferred sequences include for example DECKL and NVCEL.
⁽⁴⁾With both GLEW at positions 44-47 and KERE or KQRE at positions 43-46.
⁽⁵⁾Often as KP or EP at positions 83-84 of naturally occurring V_{HH} domains.
⁽⁶⁾In particular, but not exclusively, in combination with GLEW at positions 44-47.
⁽⁷⁾With the proviso that when positions 44-47 are GLEW, position 108 is always Q in (non-humanized) V_{HH} sequences that also contain a W at 103.
⁽⁸⁾The GLEW group also contains GLEW-like sequences at positions 44-47, such as for example GVEW, EPEW, GLER, DQEW, DLEW, GIEW, ELEW, GPEW, EWLP, GPER, GLER and ELEW.

[0285] A further detailed description of single domain antibodies, “dAbs”, and more in particular Nanobodies®, V_{HH} sequences and/or other single variable domains or combinations thereof can be found on pages 15 to 36 and pages 59 to 105 of WO 08/020,079, which are incorporated by reference herein.

[0286] According to a further aspect, the present invention provides for a diversity of polypeptide constructs which are structural variants of a template polypeptide construct.

[0287] Also, one or more or all of the polypeptide construct sequences in the above diversity (such as set, collection or library) of structural variants may be obtained or defined by rational, or semi-empirical approaches such as computer modelling techniques or biostatics or datamining techniques.

[0288] Furthermore, such a diversity, set, collection or library of polypeptide constructs can comprise one, two or more sequences that are variants from one another (e.g. with designed point mutations or with randomized positions), compromise multiple sequences derived from a diverse set of naturally diversified sequences (e.g. an immune library), or any other source of diverse. Such a diversity, set, collection or library of sequences can be displayed on the surface of a phage particle, a ribosome, a bacterium, a yeast cell, a mammalian cell, and linked to the nucleotide sequence encoding the amino acid sequence within these carriers. This makes such a diversity amenable to selection procedures to isolate the desired polypeptide construct in methods according to the invention. More generally, when a sequence is displayed on a suitable host or host cell, it is also possible (and customary) to first isolate from said host or host cell a nucleotide sequence that encodes the desired sequence, and then to obtain the desired sequence by suitably expressing said nucleotide sequence in a suitable host organism. Again, this can be performed in any suitable manner known per se, as will be clear to the skilled person.

[0289] In particular embodiments, the diversity of polypeptide constructs is a set, collection or library of polypeptide constructs, which may be any suitable set, collection or library of polypeptide constructs. For example, the set, collection or library of polypeptide constructs may be a set, collection or library of immunoglobulin sequences (as described herein), such as a naïve or immune set, collection or library of immunoglobulin sequences; a synthetic or semi-synthetic set, collection or library of immunoglobulin sequences; and/or a set, collection or library of immunoglobulin sequences that have been subjected to affinity maturation.

[0290] Also, diversity of polypeptide constructs may be a set, collection or library of polypeptide constructs comprising at least two single domain antibodies that are exclusively heavy chain variable domains of heavy chain antibodies (V_{HH} domains).

[0291] In a particular embodiment, the diversity, set, collection or library of polypeptide constructs may be an immune set, collection or library of polypeptide constructs, for example derived from a mammal that has been suitably immunized with a suitable antigen or antigenic determinant based thereon or derived therefrom, such as an antigenic part, fragment, region, domain, loop or other epitope thereof. In one particular aspect, said antigenic determinant may be an extracellular part, region, domain, loop or other extracellular epitope(s).

[0292] In the above methods, the diversity (such as set, collection or library) of polypeptide constructs may be displayed on a phage, phagemid, ribosome or suitable micro-organism (such as yeast), such as to facilitate screening. Suitable methods, techniques and host organisms for displaying and screening (a set, collection or library of) polypeptide constructs will be clear to the person skilled in the art, for example on the basis of the further disclosure herein. Reference is also made to the review by Hoogenboom in Nature Biotechnology, 23, 9, 1105-1116 (2005).

[0293] According to yet a further aspect of the invention, polypeptide constructs are provided obtainable by the methods of the present invention as described herein. The present invention also relates a polypeptide construct obtained by the method of the present invention. For a detailed description of such polypeptides of the invention, reference is made to the detailed description of the method of the invention for obtaining such polypeptide constructs.

[0294] In another aspect, the invention relates to nucleic acids that encode the polypeptide constructs obtainable by the methods of the present invention and to vectors comprising such nucleic acids sequences. Such a nucleic acid sequence may for example be in the form of a genetic construct. The invention also relates to nucleic acids that encode the polypeptide constructs obtained by the methods of the present invention and to vectors comprising such nucleic acids sequences. Such a nucleic acid sequence may for example be in the form of a genetic construct.

[0295] In another aspect, the invention relates to a host or host cell that expresses (or that under suitable circumstances is capable of expressing) a polypeptide construct obtainable by the methods of the present invention; and/or that contains a nucleic acid encoding said polypeptide construct. The invention relates to a host or host cell that expresses (or that under suitable circumstances is capable of expressing) a polypeptide construct obtained by the methods of the present invention; and/or that contains a nucleic acid encoding said polypeptide construct.

[0296] The invention further relates to a product or composition containing or comprising at least one polypeptide construct of the invention (or a suitable fragment thereof) and/or at least one nucleic acid encoding said at least one polypeptide construct of the invention, and optionally one or more further components of such compositions known per se, i.e. depending on the intended use of the composition. Such a product or composition may for example be a pharmaceutical composition (as described herein), a veterinary composition or a product or composition for diagnostic use (as also described herein).

[0297] Generally, for pharmaceutical use, the polypeptide constructs of the invention may be formulated as a pharmaceutical preparation or compositions comprising at least one polypeptide construct of the invention and at least one pharmaceutically acceptable carrier, diluent or excipient and/or adjuvant, and optionally one or more further pharmaceutically active polypeptides and/or compounds. By means of non-limiting examples, such a formulation may be in a form suitable for oral administration, for parenteral administration (such as by intravenous, intramuscular or subcutaneous injection or intravenous infusion), for topical administration, for administration by inhalation, by a skin patch, by an implant, by a suppository, etc. Such suitable administration forms—which may be solid, semi-solid or liquid, depending on the manner of administration—as well as methods and carriers for use in the preparation thereof, will be clear to the skilled person, and are further described herein.

[0298] Thus, in a further aspect, the invention relates to a pharmaceutical composition that contains at least one polypeptide construct of the invention and at least one suitable carrier, diluent or excipient (i.e. suitable for pharmaceutical use), and optionally one or more further active substances.

[0299] Generally, the polypeptide constructs of the invention can be formulated and administered in any suitable manner known per se, for which reference is for example made to the general background art cited above (and in particular to WO 04/041862, WO 04/041863, WO 04/041865, WO 04/041867 and WO 08/020,079) as well as to the standard handbooks, 18^{th} Ed., Mack Publishing Company, USA (1990), Remington, the Science and Practice of Pharmacy, 21th Edition, Lippincott Williams and Wilkins (2005); or the Handbook of Therapeutic Antibodies (S. Dubel, Ed.), Wiley, Weinheim, 2007 (see for example pages 252-255).

[0300] For example, the polypeptide constructs of the invention may be formulated and administered in any manner known per se for conventional antibodies and antibody fragments (including ScFv's and diabodies) and other pharmaceutically active proteins. Such formulations and methods for preparing the same will be clear to the skilled person, and for example include preparations suitable for parenteral administration (for example intravenous, intraperitoneal, subcutaneous, intramuscular, intraluminal, intra-arterial or intrathecal administration) or for topical (i.e. transdermal or intradermal) administration.

[0301] Preparations for parenteral administration may for example be sterile solutions, suspensions, dispersions or emulsions that are suitable for infusion or injection. Suitable carriers or diluents for such preparations for example include, without limitation, those mentioned on page 143 of WO 08/020,079. Usually, aqueous solutions or suspensions will be preferred.

[0302] The polypeptide constructs of the invention can also be administered using gene therapy methods of delivery (see, e.g. U.S. Pat. No. 5,399,346, which is hereby incorporated by reference in its entirety). Using a gene therapy method of delivery, primary cells transfected with the gene encoding a polypeptide construct of the invention can additionally be transfected with tissue specific promoters to target specific organs, tissue, grafts, tumors, or cells and can additionally be transfected with signal and stabilization sequences for subcellularly localized expression.

[0303] Thus, the polypeptide constructs of the invention may be systemically administered, e.g. orally, in combination with a pharmaceutically acceptable vehicle such as an inert diluent or an assimilable edible carrier. They may be enclosed in hard or soft shell gelatin capsules, may be compressed into tablets, or may be incorporated directly with the food of the patient's diet. For oral therapeutic administration, the polypeptide constructs of the invention may be combined with one or more excipients and used in the form of ingestible tablets, buccal tablets, troches, capsules, elixirs, suspensions, syrups, wafers, and the like. Such compositions and preparations should contain at least 0.1% of the polypeptide construct of the invention. Their percentage in the compositions and preparations may, of course, be varied and may conveniently be between about 2 to about 60% of the weight of a given unit dosage form. The amount of the polypeptide construct of the invention in such therapeutically useful compositions is such that an effective dosage level will be obtained.

[0304] The tablets, troches, pills, capsules, and the like may also contain binders, excipients, disintegrating agents, lubricants and sweetening or flavouring agents, for example those mentioned on pages 143-144 of WO 08/020,079. When the unit dosage form is a capsule, it may contain, in addition to materials of the above type, a liquid carrier, such as a vegetable oil or a polyethylene glycol. Various other materials may be present as coatings or to otherwise modify the physical form of the solid unit dosage form. For instance, tablets, pills, or capsules may be coated with gelatin, wax, shellac or sugar and the like. A syrup or elixir may contain the polypeptide constructs of the invention, sucrose or fructose as a sweetening agent, methyl and propylparabens as preservatives, a dye and flavoring such as cherry or orange flavor. Of course, any material used in preparing any unit dosage form should be pharmaceutically acceptable and substantially non-toxic in the amounts employed. In addition, the polypeptide constructs of the invention may be incorporated into sustained-release preparations and devices.

[0305] Preparations and formulations for oral administration may also be provided with an enteric coating that will allow the constructs of the invention to resist the gastric environment and pass into the intestines. More generally, preparations and formulations for oral administration may be suitably formulated for delivery into any desired part of the gastrointestinal tract. In addition, suitable suppositories may be used for delivery into the gastrointestinal tract.

[0306] The polypeptide constructs of the invention may also be administered intravenously or intraperitoneally by infusion or injection, as further described on pages 144 and 145 of WO 08/020,079.

[0307] For topical administration, the polypeptide constructs of the invention may be applied in pure form, i.e., when they are liquids. However, it will generally be desirable to administer them to the skin as compositions or formulations, in combination with a dermatologically acceptable carrier, which may be a solid or a liquid, as further described on page 145 of WO 08/020,079.

[0308] Generally, the concentration of the polypeptide constructs of the invention in a liquid composition, such as a lotion, will be from about 0.1-25 wt-%, preferably from about 0.5-10 wt-%. The concentration in a semi-solid or solid composition such as a gel or a powder will be about 0.1-5 wt-%, preferably about 0.5-2.5 wt-%.

[0309] The amount of the polypeptide constructs of the invention required for use in treatment will vary not only with the particular polypeptide construct selected but also with the route of administration, the nature of the condition being treated and the age and condition of the patient and will be ultimately at the discretion of the attendant physician or clinician. Also the dosage of the polypeptide constructs of the invention varies depending on the target cell, tumor, tissue, graft, or organ.

[0310] The desired dose may conveniently be presented in a single dose or as divided doses administered at appropriate intervals, for example, as two, three, four or more sub-doses per day. The sub-dose itself may be further divided, e.g., into a number of discrete loosely spaced administrations; such as multiple inhalations from an insufflator or by application of a plurality of drops into the eye.

[0311] An administration regimen could include long-term, daily treatment. By “long-term” is meant at least two weeks and preferably, several weeks, months, or years of duration. Necessary modifications in this dosage range may be determined by one of ordinary skill in the art using only routine experimentation given the teachings herein. See Remington's Pharmaceutical Sciences (Martin, E. W., ed. 4), Mack Publishing Co. Easton, Pa. The dosage can also be adjusted by the individual physician in the event of any complication.

[0312] In another aspect, the invention relates to a method for the prevention and/or treatment of at least one disease and/or disorder, said method comprising administering, to a subject in need thereof, a pharmaceutically active amount of a polypeptide construct of the invention and/or of a pharmaceutical composition comprising the same.

[0313] In the context of the present invention, the term “prevention and/or treatment” not only comprises preventing and/or treating the disease, but also generally comprises preventing the onset of the disease, slowing or reversing the progress of disease, preventing or slowing the onset of one or more symptoms associated with the disease, reducing and/or alleviating one or more symptoms associated with the disease, reducing the severity and/or the duration of the disease and/or of any symptoms associated therewith and/or preventing a further increase in the severity of the disease and/or of any symptoms associated therewith, preventing, reducing or reversing any physiological damage caused by the disease, and generally any pharmacological action that is beneficial to the patient being treated.

[0314] The subject to be treated may be any warm-blooded animal, but is in particular a mammal, and more in particular a human being. As will be clear to the skilled person, the subject to be treated will in particular be a person suffering from, or at risk of, the diseases and disorders mentioned herein.

[0315] The invention relates to a method for the prevention and/or treatment of at least one disease or disorder that is associated with the one or more antigens or epitopes against which a polypeptide construct according to the invention is directed, with its biological or pharmacological activity, and/or with the biological pathways or signalling in which said one or more antigens or epitopes are involved, said method comprising administering, to a subject in need thereof, a pharmaceutically active amount of a polypeptide construct of the invention, of a polypeptide of the invention, and/or of a pharmaceutical composition comprising the same. In particular, the invention relates to a method for the prevention and/or treatment of at least one disease or disorder that can be treated by modulating the one or more antigens or epitopes against which a polypeptide construct according to the invention is directed, its biological or pharmacological activity, and/or the biological pathways or signalling in which said one or more antigens or epitopes are involved, said method comprising administering, to a subject in need thereof, a pharmaceutically active amount of a polypeptide construct of the invention, and/or of a pharmaceutical composition comprising the same. In particular, said pharmaceutically effective amount may be an amount that is sufficient to modulate the one or more antigens or epitopes against which a polypeptide construct according to the invention is directed, its biological or pharmacological activity, and/or the biological pathways or signalling in which said one or more antigens or epitopes are involved; and/or an amount that provides a level of the polypeptide constructs of the invention in the circulation that is sufficient to modulate the one or more antigens or epitopes against which a polypeptide construct according to the invention is directed, their biological or pharmacological activity, and/or the biological pathways or signalling in which said one or more antigens are involved.

[0316] The invention furthermore relates to a method for the prevention and/or treatment of at least one disease or disorder that can be prevented and/or treated by administering the polypeptide construct of the invention to a patient, said method comprising administering, to a subject in need thereof, a pharmaceutically active amount of a polypeptide construct of the invention, and/or of a pharmaceutical composition comprising the same.

[0317] More in particular, the invention relates to a method for the prevention and/or treatment of at least one disease or disorder chosen from the group consisting of the diseases and disorders listed herein, said method comprising administering, to a subject in need thereof, a pharmaceutically active amount of a polypeptide construct of the invention, and/or of a pharmaceutical composition comprising the same.

[0318] In another aspect, the invention relates to a method for immunotherapy, and in particular for passive immunotherapy, which method comprises administering, to a subject suffering from or at risk of the diseases and disorders mentioned herein, a pharmaceutically active amount of a polypeptide construct of the invention and/or of a pharmaceutical composition comprising the same.

[0319] In the above methods, the polypeptide constructs of the invention and/or the compositions comprising the same can be administered in any suitable manner, depending on the specific pharmaceutical formulation or composition to be used. Thus, the polypeptide constructs of the invention and/or the compositions comprising the same can for example be administered orally, intraperitoneally (e.g. intravenously, subcutaneously, intramuscularly, or via any other route of administration that circumvents the gastrointestinal tract), intranasally, transdermally, topically, by means of a suppository, by inhalation, again depending on the specific pharmaceutical formulation or composition to be used. The clinician will be able to select a suitable route of administration and a suitable pharmaceutical formulation or composition to be used in such administration, depending on the disease or disorder to be prevented or treated and other factors well known to the clinician.

[0320] The polypeptide constructs of the invention and/or the compositions comprising the same are administered according to a regime of treatment that is suitable for preventing and/or treating the disease or disorder to be prevented or treated. The clinician will generally be able to determine a suitable treatment regimen, depending on factors such as the disease or disorder to be prevented or treated, the severity of the disease to be treated and/or the severity of the symptoms thereof, the specific polypeptide construct of the invention to be used, the specific route of administration and pharmaceutical formulation or composition to be used, the age, gender, weight, diet, general condition of the patient, and similar factors well known to the clinician.

[0321] Generally, the treatment regimen will comprise the administration of one or more polypeptide constructs of the invention, or of one or more compositions comprising the same, in one or more pharmaceutically effective amounts or doses. The specific amounts) or doses to administered can be determined by the clinician, again based on the factors cited above.

[0322] Generally, for the prevention and/or treatment of the diseases and disorders mentioned herein and depending on the specific disease or disorder to be treated, the potency of the specific polypeptide construct of the invention to be used, the specific route of administration and the specific pharmaceutical formulation or composition used, the polypeptide constructs of the invention will generally be administered in an amount between 1 gram and 0.01 microgram per kg body weight per day, preferably between 0.1 gram and 0.1 microgram per kg body weight per day, such as about 1, 10, 100 or 1000 microgram per kg body weight per day, either continuously (e.g. by infusion), as a single daily dose or as multiple divided doses during the day. The clinician will generally be able to determine a suitable daily dose, depending on the factors mentioned herein. It will also be clear that in specific cases, the clinician may choose to deviate from these amounts, for example on the basis of the factors cited above and his expert judgment. Generally, some guidance on the amounts to be administered can be obtained from the amounts usually administered for comparable conventional antibodies or antibody fragments against the same target administered via essentially the same route, taking into account however differences in affinity/avidity, efficacy, biodistribution, half-life and similar factors well known to the skilled person.

[0323] Usually, in the above method, a single polypeptide construct of the invention will be used. It is however within the scope of the invention to use two or more polypeptide constructs of the invention in combination.

[0324] The polypeptide constructs of the invention may also be used in combination with one or more further pharmaceutically active compounds or principles, i.e. as a combined treatment regimen, which may or may not lead to a synergistic effect. Again, the clinician will be able to select such further compounds or principles, as well as a suitable combined treatment regimen, based on the factors cited above and his expert judgement.

[0325] In particular, the polypeptide constructs of the invention may be used in combination with other pharmaceutically active compounds or principles that are or can be used for the prevention and/or treatment of the diseases and disorders cited herein, as a result of which a synergistic effect may or may not be obtained. Examples of such compounds and principles, as well as routes, methods and pharmaceutical formulations or compositions for administering them will be clear to the clinician.

[0326] When two or more substances or principles are to be used as part of a combined treatment regimen, they can be administered via the same route of administration or via different routes of administration, at essentially the same time or at different times (e.g. essentially simultaneously, consecutively, or according to an alternating regime). When the substances or principles are to be administered simultaneously via the same route of administration, they may be administered as different pharmaceutical formulations or compositions or part of a combined pharmaceutical formulation or composition, as will be clear to the skilled person.

[0327] Also, when two or more active substances or principles are to be used as part of a combined treatment regimen, each of the substances or principles may be administered in the same amount and according to the same regimen as used when the compound or principle is used on its own, and such combined use may or may not lead to a synergistic effect. However, when the combined use of the two or more active substances or principles leads to a synergistic effect, it may also be possible to reduce the amount of one, more or all of the substances or principles to be administered, while still achieving the desired therapeutic action. This may for example be useful for avoiding, limiting or reducing any unwanted side-effects that are associated with the use of one or more of the substances or principles when they are used in their usual amounts, while still obtaining the desired pharmaceutical or therapeutic effect.

[0328] The effectiveness of the treatment regimen used according to the invention may be determined and/or followed in any manner known per se for the disease or disorder involved, as will be clear to the clinician. The clinician will also be able, where appropriate and on a case-by-case basis, to change or modify a particular treatment regimen, so as to achieve the desired therapeutic effect, to avoid, limit or reduce unwanted side-effects, and/or to achieve an appropriate balance between achieving the desired therapeutic effect on the one hand and avoiding, limiting or reducing undesired side effects on the other hand.

[0329] Generally, the treatment regimen will be followed until the desired therapeutic effect is achieved and/or for as long as the desired therapeutic effect is to be maintained. Again, this can be determined by the clinician.

[0330] In another aspect, the invention relates to the use of a polypeptide construct of the invention in the preparation of a pharmaceutical composition for prevention and/or treatment of at least one disease and/or disorder; and/or for use in one or more of the methods of treatment mentioned herein.

[0331] The subject to be treated may be any warm-blooded animal, but is in particular a mammal and more in particular a human being. As will be clear to the skilled person, the subject to be treated will in particular be a person suffering from, or at risk of, the diseases and disorders mentioned herein.

[0332] The invention also relates to the use of a polypeptide construct of the invention in the preparation of a pharmaceutical composition for the prevention and/or treatment of at least one disease or disorder that can be prevented and/or treated by administering a polypeptide construct of the invention to a patient.

[0333] More in particular, the invention relates to the use of a polypeptide construct of the invention in the preparation of a pharmaceutical composition for the prevention and/or treatment of diseases and/or disorders, and in particular for the prevention and treatment of one or more of the diseases and disorders listed herein.

[0334] Again, in such a pharmaceutical composition, the one or more polypeptide constructs of the invention may also be suitably combined with one or more other active principles, such as those mentioned herein.

[0335] The invention will now be further described by means of the following non-limiting preferred aspects, examples and figures:

### FIGURE LEGENDS

[0336] FIG. 1: Anti-HER2 humoral immune response induced after immunisation of Llama glama with HER2-overexpressing SKBR3 cells. The reactivity of pre-immune (day 0) and immune sera (day 42 and day of PBL1 take) of animals 121 and 122 immunized with whole cells was determined by ELISA using rhErbB2-Fc as antigen according to particular embodiments of the invention (e.g. see Example 3.2). A: total IgG response; B: IgG1 isotype response; C: IgG2 isotype response; D: IgG3 isotype response.

[0337] FIG. 2: HER2-specific ELISA analysis of periplasmic preparations containing myc-tagged Nanobody protein fragments from selected clones, according to particular embodiments of the invention. Periplasmic preparations of soluble Nanobody protein fragments were added to wells of an ELISA plate, which had been coated with rhErbB2/Fc antigen and had been additionally blocked with PBS+1% casein. Detection was performed by a monoclonal anti-myc antibody followed by an alkaline phosphatase-conjugated polyclonal goat anti-mouse antibody. The ELISA was developed by a PNPP-substrate as described in Example 6. The OD-values (Y-axis) were measured at 405 nm by an ELISA-reader. Each bar represents an individual periplasmic extract.

[0338] FIG. 3: Flow cytometric analysis of selected clones (2A1, 2A4, 2C3, 2C5, 2D3 and 2G4) according to particular embodiments of the invention. Nanobody-containing periplasmic extracts were added to ErbB2 overexpressing SKBR3 cells. Detection was performed by a monoclonal anti-myc antibody followed by a PE-labeled polyclonal anti-mouse antibody. Nanobodies binding to cells was measured by an increase in fluorescence intensity as compared to cells that were incubated with FACS buffer (PBS+10% FBS) followed by monoclonal anti-myc antibody and PE-labeled polyclonal anti-mouse antibody. Fluorescence intensity is blotted on the X-axis, the number of events on the Y-axis.

[0339] FIG. 4: Herceptin® competitive ELISA according to particular embodiments of the invention. An ELISA plate was coated with SKBR3 vesicles (5 μg/ml) and additionally blocked with PBS+1% casein. 2 nM Herceptin® was added to the wells, after which periplasmic preparations of soluble Nanobody protein fragments were added. Detection of Herceptin® binding to SKBR3 vesicles was performed by an alkaline phosphatase-conjugated AffiniPure Goat Anti-Human IgG, Fc Fragment Specific (Jackson ImmunoResearch Labs, Suffolk, UK). The ELISA was developed by a PNPP-substrate as described in Example 6. The OD-values (Y-axis) were measured at 405 nm by an ELISA-reader. Each bar represents an individual periplasmic extract. The OD value corresponding to the maximal signal represents the OD value measured for binding of Herceptin® without addition of periplasmic extract containing HER-binding Nanobody. The minimal signal represents the background staining of non-coated wells incubated only with alkaline phosphatase-conjugated AffiniPure Goat Anti-Human IgG, followed by detection using a PNPP-substrate. Controls 1-5 represent individual periplasmic extracts containing non-HER2 binding Nanobodies.

[0340] FIG. 5: Herceptin®-competitive FMAT according to particular embodiments of the invention. Dilutions of periplasmic extracts containing HER2 binding Nanobodies were tested for their ability to block the binding of Herceptin® to HER2-overexpressing SKBR3 cells as described in Example 8. (−) represents the signal obtained for binding of Alexa647-labeled Herceptin® without addition of periplasmic extract. Addition of periplasmic extract containing a non-HER2 binding Nanobody (irr) had no influence on the binding of Herceptin® to SKBR3 cells. Periplasmic extracts 2A4, 2A5, 2A6, 2B1, 2B2, 2B4, 2B5, 2C1, 2C3, 2D2 and 2D3 blocked binding of Herceptin® to HER2 with more than 80%.

[0341] FIG. 6: Herceptin®-competitive FMAT analysis according to particular embodiments of the invention. Nanobodies compete with binding of Herceptin® to SKBR3 cells in a dose-dependent manner as described in Example 8.

[0342] FIG. 7: Omnitarg-Fab competitive FMAT according to particular embodiments of the invention. Dilutions of periplasmic extracts containing HER2 binding Nanobodies were tested for their ability to block the binding of Omnitarg-Fab (OT-Fab) to HER2-overexpressing SKBR3 cells as described in Example 9. (cells) represents the signal obtained for binding of biotinylated OT-Fab without addition of periplasmic extract. Addition of periplasmic extract containing a non-HER2 binding Nanobody (irr) had no influence on the binding of OT-Fab to SKBR3 cells. Periplasmic extracts 47A8, 47A11, 47B1, 47B12, 47D1, 47D4, 47D5, 47E7, 47F5 and 47G7 blocked binding of OT-Fab to HER2 with more than 85%.

[0343] FIG. 8: Growth inhibitory effect of monovalent HER2 binding Nanobodies on ErbB2-overexpressing SKBR3 cells according to particular embodiments of the invention. SKBR3 cells were seeded in 96 well plates and allowed to adhere as explained in Example 11. HER2-binding Nanobodies 5F7, 2A5, 2A4, 2D3 and 2C3, non-HER2 binding irrelevant Nanobody 12B2 or medium alone were added and the cells were incubated for 3 days. During the last 24 h, cells were pulsed with 1 μCi [³H]-thymidine. Incorporation of [³H]-thymidine was measured as described in Example 11.

[0344] FIG. 9: Herceptin®-competitive FMAT. Dilutions of monovalent, bivalent and bispecific Nanobodies were tested for their ability to block the binding of Herceptin® to HER2-overexpressing SKBR3 cells according to particular embodiments of the invention (e.g. as described in Example 12). Bispecific Nanobodies 2A4-9GS-ALB1 and 2A5-9GS-ALB1 blocked the binding of Herceptin® to HER2-expressing SKBR3 cells to the same extent as the monovalent 2A4 and 2A5 Nanobodies respectively. Bivalent 2A4-9GS-2A4 and 2A5-9GS-2A5 Nanobodies blocked the binding of Herceptin® to HER2-expressing SKBR3 cells to a greater extent than their monovalent format. A: 2A4 derivatives; B: 2A5 derivatives.

[0345] FIG. 10: Design of biparatopic Nanobody expression vector according to particular embodiments of the invention (e.g. as described in Example 13.1).

[0346] FIG. 11: SKBR3 cell proliferation assay with biparatopic Nanobodies purified from periplasmic extracts derived from plate 27 by PhyTip200⁺ according to particular embodiments of the invention. Biparatopic Nanobodies 27A2-35GS-2D3, 27A5-35GS-2D3, 27B3-35GS-2D3, 27B5-35GS-2D3, 27C4-35GS-2D3, 27D3-35GS-2D3 and 27D6-35GS-2D3 block SKBR3 cell proliferation to a greater extent than 50 nM Herceptin®. Biparatopie Nanobodies 27A7-35GS-2D3, 27A9-35GS-2D3, 27A1′-35GS-2D3, 27A12-350S-2D3, 27B11-35GS-2D3, 27C11-350S-2D3 and 27D7-35GS-2D3 display an agonistic effect.

[0347] FIG. 12: Sensorgram of monovalent 2D3, bivalent 2D3-35GS-2D3 and dummy-2D3 biparatopic Nanobodies according to particular embodiments of the invention.

[0348] FIG. 13: Sensorgram of monovalent 2D3 and biparatopic Nanobodies 27B7-35GS-2D3, 27C3-35GS-2D3 and 27H5-35GS-2D3 according to particular embodiments of the invention.

[0349] FIG. 14: Sensorgram of monovalent 2D3, bivalent 2D3-35GS-2D3 and biparatopic Nanobodies 27A3-35GS-2D3, 27E7-35GS-2D3 and 27D1-35GS-2D3 according to particular embodiments of the invention.

[0350] FIG. 15: Herceptin®-competitive FMAT. Dilutions of monovalent 2D3, bivalent 2D3-35GS-2D3 and biparatopic Nanobodies combining the Herceptin®-competitive 2D3 and a HER2-binding or dummy Nanobody were tested for their ability to block the binding of Herceptin® to HER2-overexpressing SKBR3 cells according to particular embodiments of the invention (e.g. as described in Example 14.2). A: Bivalent 2D3-35GS-2D3 and biparatopic Nanobodies 27H3-35GS-2D3 and 27D1-35GS-2D3 block binding of Herceptin® to HER2 expressed on SKBR3 cells more efficiently than monovalent 2D3 Nanobody. B: Nanobodies 27A3, 27A5 and 30D10 have no influence on the Herceptin®-competitive behavior of Nanobody 2D3 when fused to its N-terminal end, spaced by a 35GS linker. C: Nanobodies 27B7, 27C3, 27H5 and the dummy Nanobody have an inhibitory effect on the Herceptin®-competitive potential of 2D3 when fused to its N-terminal end, spaced by a 35GS linker.

[0351] FIG. 16: Omnitarg-Fab competitive FMAT according to particular embodiments of the invention. Dilutions of OT-Fab, monovalent 2D3 and biparatopic Nanobodies 27C3-35GS-2D3, 27A5-35GS-2D3, 27H3-35GS-2D3 and dummy-35GS-2D3 were tested for their ability to block the binding of OT-Fab to HER2-overexpressing SKBR3 cells as described in Example 14.3. None of the bipartope Nanobodies, nor monovalent 2D3 blocked the binding of OT-Fab to HER2 expressed on SKBR3 cells. OT-Fab blocked binding of biotinylated OT-Fab in a dose-dependent manner.

[0352] FIG. 17: Effect of biparatopic Nanobodies on SKBR3 tumor cell proliferation according to particular embodiments of the invention. Biparatopic Nanobodies 27A5-35GS-2D3, 27A3-35GS-2D3 and 30D10-35GS-2D3 significantly block proliferation of SKBR3 tumor cells and to a greater extent than the monovalent 2D3 and dummy-2D3 biparatopic Nanobody.

[0353] FIG. 18: Effect of biparatopic Nanobodies on AKT signaling in SKBR3 cells according to particular embodiments of the invention (e.g. see Example 16). Biparatopic 27A3-35GS-2D3 and 27A5-35GS-2D3, Herceptin®, but not dummy-2D3 biparatopic or monovalent 2D3 Nanobody inhibits AKT phosphorylation in whole SKBR3 cell lysates.

[0354] FIG. 19: Sensorgram of HER2-ECD binding to 2D3, 47D5 or the biparatopic Nanobody 2D3-35GS-47D5 according to particular embodiments of the invention.

[0355] FIG. 20: Effect of biparatopic Nanobodies combining Herceptin®-competitive and Omnitarg competitive Nanobodies, monovalent Nanobodies 2D3, 5F7 and 47D5, Omnitarg-Fab and Herceptin® on HRG-mediated activation of mitogen-activated protein kinase (MAPK) according to particular embodiments of the invention.

[0356] FIG. 21: Effect of biparatopic Nanobodies combining Herceptin®-competitive and Omnitarg competitive Nanobodies, monovalent Nanobodies 2D3, 5F7 and 47D5, Omnitarg-Fab and Herceptin® on HRG-mediated activation of Akt signaling according to particular embodiments of the invention.

[0357] FIGS. 22A and 22B: Model of NB-2D3 (blue) linked to another Nanobody (cyan) docked on HER-2 (red) according to particular embodiments of the invention. The linker is shown in black. N denotes the N-terminus of NB-2D3; C is the C-terminus of Nb-2D3.

[0358] FIG. 23: Energy penalty values for each residue in the linker +/−10 residues of each Nanobody connected to the linker in the biparatopic construct 5F7-35GS-47D5 with appropriate linker length according to particular embodiments of the invention. None of the residues of the linker or at the connection points of the linker with the Nanobodies (NB-1 and NB-2) have a high energy penalty value.

[0359] FIG. 24: Energy penalty values for each residue in the linker +/−10 residues of each Nanobody connected to the linker in the biparatopic construct 47D5-35GS-5F7 with unappropriate linker length according to particular embodiments of the invention. High energy penalty values are observed at the C-terminal connection of the linker with the N-terminal end of the second Nanobody (NB-2).

[0360] FIG. 25: Energy penalty values for each residue in the linker +/−10 residues of each Nanobody connected to the linker in a biparatopic construct with the same Nanobodies as in FIG. 23 but with a longer linker length (47D5-40GS-5F7) according to particular embodiments of the invention. We see that the high energy penalty values at the connection of the C-terminal end of the linker with the N-terminal end of NB-2 are reduced suggesting a more appropriate linker length. The energy penalty values at both ends of the linker are still higher than those observed in FIG. 22, indicating a still not optimal linker.

[0361] FIG. 26A: Backbone RMSD (Å²) between the 5F7-linker-47D5 constructs (built by homology modelling) with the individual Nanobodies 5F7 and 47D5 in their unlinked binding mode according to particular embodiments of the invention. The linker length varies from 5 to 35.

[0362] FIG. 26B: Ribbon view of the 5F7-linker-47D5 biparatopic construct for 2 linker lengths according to particular embodiments of the invention. The binding mode of the individual Nanobodies is shown in blue; the biparatopic constructs are in red. The HER-2 target is omitted for clarity. On the left side: a 35GS linker is used between the 2 Nanobodies and a very limited deviation from the individual binding modes is observed. On the right side: a 5GS linker is used and it can clearly been observed that both Nanobodies in the biparatopic construct significantly deviate from their optimal binding mode.

[0363] FIGS. 27A-K: Figures illustrating some of the preferred aspects and some of the advantages of the present invention, including the multiparatopic polypeptides of the invention.

### EXAMPLES

### Example 1

### Procurement of the Extracellular Domain of HER2 for use as Selection Antigen in Phage Display

### 1.1 Cloning of Extracellular HER2 Domain

[0364] cDNA was isolated from SKBR3 breast cancer cells. The isolation of total RNA and cDNA synthesis was done according to standard protocols (Sambrook, Molecular cloning: Laboratory manual, 2^{nd} edition, Cold Spring Harbor Laboratory Press, Cold Spring Harbor, N.Y. (1989)). The coding sequence of the extracellular domain of the HER2 antigen was amplified by PCR using primer For-ErbB2 ECD; GCGAGCACCCAAGTGTGCACC (SEQ ID NO: 2267) and primer Rev-ErbB2 ECD: CTGCTCGGCGGGGCAGCCCTT (SEQ ID NO: 2268). The PCR construct was then cloned into the pCR4-TOPO cloning vector (Invitrogen, Paisley, UK). Clone 4 having the correct sequence was then amplified by PCR using primers (For-pST ErbB2 ECD: GGCGCGCCGACTACAAAGACGATGACGACAAGAGCACCCAAGTGTGCACC (SEQ ID NO: 2269) and Rev-pST ErbB2 ECD: CGGCTCGAGCTATTAATGAGAATGGTGATGGTGCTCGGCGGGGCAGCCCTT (SEQ ID NO: 2270)) that were designed to introduce restriction sites at the beginning and the end of the fragment encoding the HER2-ECD. The PCR product was then cloned via AscI and XhoI into the plasmid pSecTag-HygroA (Invitrogen, Paisley, UK). As such, the coding sequence of the HER2-ECD was fused in frame with the Ig-κ chain leader sequence at its N-terminal end followed by a Flag tag and a polyhistidine tag at the C-terminus. The sequence of different clones was determined by sequencing according to standard protocols.

### 1.2 Expression of the Extracellular Domain of HER2 in HEK 293 Cells, Purification of the Recombinant Protein

[0365] Expression of the extracellular domain of HER2 was performed in HEK293T cells. HEK293T cells were seeded at 2×10⁶ cells in 20 ml Dulbecco's Modified Eagle's Medium (DMEM) containing 10% FBS in T75 tissue culture flasks and allowed to adhere overnight. The next day, culture supernatant was removed and the cells were transiently transfected with purified pSecTag-HygroA plasmid DNA using Fugene-HD (Roche, Basel, Switzerland) as transfection agent. Cells were grown for an additional 72 h in DMEM containing 0.1% FBS, after which the culture supernatant was collected and filter-sterilized on a 0.22 μm filter (Millipore). The construct was then further purified out of the culture supernatant by immobilized metal affinity chromatography (IMAC) and size exclusion chromotagraphy (SEC).

[0366] Detection of the recombinant protein was performed by ELISA. Maxisorp 96-well plate (Num, Wiesbaden, Germany) was coated with an anti-flag monoclonal antibody (Sigma Aldrich, Bornem, Belgium). Unspecific binding was blocked with 2% milk powder in PBS for 2 hours. All prior and subsequent washes were performed with PBS. Afterward, eluate fractions were incubated for 2 hours at room temperature, followed by incubation with Herceptin®. Detection of the recombinant HER2-ECD was performed with a horseradish peroxidase conjugated anti-IgG antibody (Jackson Immunoresearch Laboratories, Suffolk, UK). Development of the ELISA was performed with TMB substrate (Pierce, Rockford, Ill.) according to the specifications of the manufacturer

### Example 2

### Procurement of Omnitarg-Fab for use as Competitive Agent in Phage Display and Screening Assays

### 2.1 Cloning of Omnitarg-Fab

[0367] Omnitarg-Fab was constructed by gene assembly. The amino acid sequence of variable light and variable heavy chain of Omnitarg was derived from patents WO 2006/044908 and WO 2004/048525. The sequence was backtranslated and codon optimized using Leto 1.0 Gene optimization software (www.entechelon.com). Oligonucleotide primers for assembly of the variable light chain (V_{L}), variable heavy chain (V_{H}), constant light chain (C_{L}) and constant domain 1 of the heavy chain (CH₁) of the Omnitarg-Fab were designed (Tables C-5 and C-6) and assembly PCR performed. The introduced restriction sites SfiI and BsiWI for the V_{L}. KpnI and BstEII for the V_{H}, BsiWI and AscI for the C_{L}, and BstEII and NotI for the CH₁ were utilized for sequential cloning into an in-house expression vector derived from pUC119 which contained the LacZ promoter, a resistance gene for ampicillin or carbenicillin, a multicloning site and the gen3 leader sequence. In frame with the Omnitarg-Fab coding sequence, the vector coded for a C-terminal c-myc tag and a (His)6 tag. Oligonucleotide sequences were designed to have a 15 nucleotide overlap with 5′ and 3′ overlapping oligonucleotides. Three consecutive PCR overlap extension rounds were performed using Expand High fidelity PCR system (Roche, Basel, Switzerland) to obtain V_{L}, V_{H}, C_{L} and CH₁ respectively. The obtained PCR fragments were cloned into the pCR4-TOPO cloning vector (Invitrogen, Paisley, UK). Plasmid DNA was prepared from clones having the correct sequence. The fragments were isolated from the pCR4-TOPO cloning vector via restriction with the appropriate enzymes and extraction of the fragments from agarose gel. The fragments were then consecutively cloned into the in-house expression vector.

2.2 Expression of the Omnitarg-Fab in E. coli Cells, Purification of the Recombinant Protein

[0368] The Omnitarg-Fab fragment was expressed in E. coli as His6-tagged protein and subsequently purified from the culture medium by immobilized metal affinity chromatography (IMAC) and size exclusion chromatography (SEC).

[0369] Omnitarg-Fab was biotinylated using EZ-Link Sulpha-NHS-LC-Biotin labeling kit according to the manufacturer's instructions (Pierce, Rockford, Ill.). Removal of free biotin was performed on Zeba Desalt Spin columns according to the manufacturer's instructions (Pierce, Rockford, Ill.).

### Example 3

### Identification of HER2 Binding Nanobodies

### 3.1 Immunizations

[0370] After approval of the Ethical Committee of the Faculty of Veterinary Medicine (University Ghent, Belgium), 2 llamas (121, 122) were immunized, according to standard protocols, with 6 intramuscular injections at biweekly intervals of SKBR3 human tumor cells which are derived from a breast tumor and contain an amplified HER2 gene and overexpress HER2 p185 tyrosine kinase (SKBR3; ATCC HTB-30; LGC Promochem, Middlesex, UK). Each dose consisted of approximately 5×10⁷ freshly harvested SKBR3 cells.

### 3.2 Evaluation of Induced Responses in Llama

[0371] At day 0, 42 and 81 (time of PBL collection), sera were collected to evaluate the induction of immune responses in the animals against HER2 by ELISA. In short, 2 μg/ml recombinant human ErbB2/Fc chimera (rhErb2-Fc; R&D Systems, Minneapolis, Minn.) were immobilized overnight at 4° C. in a 96 well Maxisorp plate (Num, Wiesbaden, Germany). Wells were blocked with a casein solution (1% in PBS). After addition of serum dilutions, specifically bound immunoglobulins were detected using a goat anti-llama horseradish peroxidase conjugate (Bethyl Lab. Inc., Montgomery, Tex.), showing that for all animals a significant antibody dependent immune response against HER2 was induced (FIG. 1A). The antibody response was mounted both by the conventional and the heavy chain only antibody expressing B-cell repertoires since specifically bound immunoglobulins could be detected with antibodies specifically recognizing the conventional llama IgG1 antibodies (FIG. 1B) or the heavy-chain only llama IgG2 (FIG. 1C) and IgG3 (FIG. 1D) antibodies.

### 3.3 Library Construction

[0372] When an appropriate immune response was induced in llama, four days after the last antigen injection, a 150 ml blood sample was collected and peripheral blood lymphocytes (PBLs) were purified by a density gradient centrifugation on Ficoll-Paque™ (Amersham Biosciences, Uppsala, Sweden) according to the manufacturer's instructions. Next, total RNA was extracted from these cells and used as starting material for RT-PCR to amplify Nanobody encoding gene fragments. These fragments were cloned into a phagemid vector derived from pUC119 which contained the LacZ promoter, a coliphage pIII protein coding sequence, a resistance gene for ampicillin or carbenicillin, a multicloning site and the gen3 leader sequence. In frame with the Nanobody® coding sequence, the vector coded for a C-terminal c-myc tag and a (His)6 tag. Phage was prepared according to standard methods (see for example the prior art and applications filed by applicant cited herein) and stored after filter sterilization at 4° C. for further use.

### 3.4 Selections

[0373] Phage libraries obtained from llamas 121 and 122 were used for different selections.

[0374] In a first selection, ErbB2/Fc chimera (R&D Systems, Minneapolis, Minn., US) was coated onto Maxisorp 96-well plates (Nunc, Wiesbaden, Germany) at 20, 5 and 1 nM. Following incubation with the phage libraries and extensive washing, bound phage was specifically eluted with trypsin (1 mg/ml).

[0375] In a second selection. ErbB2/Fc chimera (R&D Systems, Minneapolis, US) was coated onto Maxisorp 96-well plates (Nunc, Wiesbaden, Germany) at 20 nM. Following incubation with the phage libraries and extensive washing, bound phage was specifically eluted with Herceptin® (Genentech, Roche).

[0376] In a third selection, soluble biotinylated ErbB2/Fc chimera was incubated with the phage libraries. After extensive washing, the biotinylated ErbB2/Fc was captured on a neutravidin coated solid phase. Bound phage was specifically eluted with trypsin (1 mg/ml).

[0377] In a fourth selection, soluble biotinylated ErbB2/Fc chimera was incubated with the phage libraries. After adding a 100-fold excess of non-labeled HER2, the biotinylated ErbB2/Fc was captured on a neutravidin coated solid phase. Bound phage was specifically eluted with trypsin (1 mg/ml).

[0378] In a fifth selection, phage libraries were incubated with Herceptin®-captured ErbB2/Fc. After extensive washing, bound phage was specifically eluted with trypsin (1 mg/ml)

[0379] In a sixth selection, soluble biotinylated ErbB2/Fc chimera was incubated with the phage libraries. After extensive washing, the biotinylated ErbB2/Fc was captured on a neutravidin coated solid phase. Bound phage was specifically eluted with Omnitarg-Fab.

[0380] In a seventh selection, phage libraries were incubated with Herceptin®-captured ErbB2/Fc. After extensive washing, bound phage was specifically eluted with Omnitarg-Fab.

[0381] In an eighth selection, phage libraries were incubated with biotinylated extracellular domain of HER2 captured on a neutravidin coated solid phase. After extensive washing, bound phage was specifically eluted with Omnitarg-Fab.

[0382] In a ninth selection, phage libraries were incubated with biotinylated extracellular domain of HER2 captured on a neutravidin coated solid phase. After extensive washing, bound phage was specifically eluted with Herceptin®.

[0383] In all selections, enrichment was observed. The output from each selection was recloned as a pool into an expression vector derived from pUC119 which contained the LacZ promoter, a resistance gene for ampicillin or carbenicillin, a multicloning site and the gen3 leader sequence. In frame with the Nanobody® coding sequence, the vector coded for a C-terminal c-myc tag and a (His)6 tag. Colonies were picked and grown in 96 deep-well plates (1 ml volume) and induced by adding IPTG for Nanobody expression. Periplasmic extracts (volume: ˜80 μl) were prepared according to standard methods (see for example the prior art and applications filed by applicant cited herein).

### Example 4

### Detection and Isolation of HER2-Specific Heavy Chain Antibody Producing B-Cells

[0384] PBMC were isolated from peripheral blood samples from llamas immunized with HER2-Fc or SKBR3 human tumor cells using Ficoll density gradient centrifugation. These were then resuspended in cell culture medium and partially depleted from monocytes by adherence to the surface of plastic tissue culture T-flasks.

[0385] Next, non-adherent PBMC were collected from the flasks, washed with FACS buffer (PBS/10% FCS) at 4° C. and resuspended in the same ice-cold buffer. These were then stained using a combination of Alexa 488 labeled HER2-Fc (produced in-house, using Invitrogen (Paisley, UK) activated Alexa 488 and HER2-Fc recombinant protein from R&D Systems (Minneapolis, Minn.)), phycoerythrin labeled mouse-anti-llama IgG2 and -3 monoclonal antibodies (produced in-house, using purified phycoerythrin from Cyanotech, (Kailua-Kona, Hi.) crosslinked using the sulfo-SMCC heterobifunctional linker from Pierce-Endogen (Rochford, Ill.) to in-house produced and purified monoclonal antibodies originally described in Daley et al. (Clin. Diagn. Lab. Immunol. 2005, 12: 380)), Alexa 647 labeled mouse-anti-llama IgG1 monoclonal antibody (produced in-house), Alexa 647 labeled mouse-anti-llama monocyte and neutrophil antibody DH59B (purified antibody obtained from VMRD Inc. (Pullman, Wash.)) and dead cell specific dye TOPRO3 (Invitrogen, Paisley, UK). In some experiments, in-house Alexa 647 labeled recombinant human IgG1 Fc fragment (R&D Systems, Minneapolis, Minn.) was added to the stain combination as well.

[0386] Stained samples were washed thoroughly using cold FACS buffer and analyzed on a standard two-laser BD FACSAria cell sorter equipped with the ACDU microtiter plate single-cell deposition option (BD Biosciences, Franklin Lakes, N.J.). During acquisition and analysis, a gate was set on lymphocytes based on their forward/side scatter profile, which overlaps considerably with monocytes in llama. Doublet events were eliminated from acquisition and analysis by forward as well as side scatter pulse processing, eliminating all events which might be originating from more than one cell. Dead cells, monocytes and B-cells expressing conventional antibody on their cell membrane were removed from further analysis by gating out all remaining events having fluorescence over background (unstained PBMC) in the Alexa647/TOPRO3 channel. In some experiments, Alexa 647 labeled recombinant Fe fragment was used to stain the PBMC additionally. In these experiments, B-cells producing antibody binding Fc were also rejected from analysis and sorting by similar Alexa 647 channel exclusion, so as to avoid isolation of B-cells binding the Fe region of the fusion protein. In the phycoerythrin channel, B-cells displaying heavy chain antibody on their cell membrane could be clearly differentiated from any other remaining lymphocyte-type cells, and another gate was set on this population. Lastly, antigen-binding heavy chain IgG expressing B-cells cells were detected as a discrete high fluorescence intensity peak population in the Alexa 488 channel histogram distinct from the main population being no more fluorescent in this channel than when no Alexa 488 labeled antigen was added. Individual antigen binding B-cells were collected in separate wells of 96-well PCR plates in the ACDU, using DiVa software predefined stringent single-cell sorting criteria to avoid any double-cell droplet or adjacent-droplet double cell sorting. Typically, only 1-5% of heavy chain B-cells were found to bind antigen.

### Example 5

### Amplification and Cloning of HER2-Specific Heavy Chain Antibody Variable Regions

[0387] Individual B-cells expressing heavy chain antibodies binding HER2-Fc or the HER2 region of the fusion protein specifically were sorted into 96-well plates containing 40 μl of RT-PCR buffer (Superscript III One-step RT-PCR kit, Invitrogen, Paisley, UK) per well, as described in Example 5, and stored at −80° C. For variable region gene sequence recovery, plates were thawed at room temperature and a mix of NP-40 (Roche Applied Sciences, Indianapolis, Ind.), gene specific 5′ and 3′ primers and RT-PCR enzyme mix were added to a total volume of 50 microliter per well by an automated liquid handler (Tecan, Mannedorf, Switzerland). After reverse transcription and first PCR amplification in a standard thermal cycler, a 2 microliter aliquot was removed from all wells and amplified in a nested PCR reaction using a proof-reading thermostable polymerase, or blend of polymerases containing at least one proof-reading enzyme. The 5′ nested primer contains the nucleotide sequence required for directional TOPO cloning (Invitrogen, Paisley, UK). The 3′ primer is designed to allow for the in-frame fusion of variable region gene framework 4 to vector encoded detection (c-myc) and purification (6His) peptide tags. Amplicons were detected from individual wells using ethidium bromide stained agarose gels and/or in microtiter plates via PicoGreen DNA binding fluorescent dye assay (Invitrogen, Paisley, UK). Typically, up to 60% of wells contained a single and sharply defined amplification product, whereas control wells in the same plate not having received any cells were completely devoid of amplification product.

[0388] The amplicons from nested PCR wells containing detectable product were then ligated into an E. coli expression vector in a homogenous ligation reaction, by mixing an aliquot of unpurified PCR mix with a topoisomerase-activated expression vector (in-house developed IPTG inducible E. coli Nanobody expression vector, adapted to allow directional TOPO cloning by Invitrogen's custom services department). The ligation mixture was then pipetted onto electrocompetent E. coli cells pre-aliquotted in a 96-well format electroporation chamber array (BTX Products of Harvard Apparatus, Holliston, Mass.), and cells were transformed by electroporation using a BTX pulse generator.

[0389] Transformation mix was spread on selective agarose, multiple individual subcolonies picked and grown in 96-well deep well plates containing liquid selective medium by a QP Expression colony picker/rearrayer system (Genetix, New Milton, Hampshire, UK).

[0390] Periplasmic extracts (volume: ˜80 μl) were prepared according to standard methods (see for example the prior art and applications filed by applicant cited herein).

### Example 6

### Anti-HER2Nanobodies Recognize Extracellular HER2 Domain

[0391] Periplasmic extracts of individual Nanobodies were screened for HER2 specificity by ELISA on solid phase coated ErbB2/Fc chimera (R&D Systems, Minneapolis, Minn.). Detection of Nanobody fragments bound to immobilized recombinant HER2 antigen was carried out using an in house made mouse anti-myc antibody (2 mg/ml) detected with alkaline phosphatase-conjugated anti-mouse IgG (Sigma Aldrich, Bornem. Belgium). The signal was developed by adding PNPP substrate solution and detected at a wavelength of 405 nm. FIG. 2 is illustrative of typical ELISA results, showing a high hit rate of positive clones.

[0392] Sequences of different HER2 binding clones are depicted in Tables B-1, B-2 and B-3. Alignment of the different HER2 binding clones based on CDR3 similarity is depicted in Table C-1.

### Example 7

### Anti-HER2Nanobodies Recognize Cell Surface Exposed Receptor Epitopes

[0393] To verify whether the Nanobodies are able to recognize cell surface expressed HER2, binding to breast cancer tumor cell line SKBR3 was assessed by flow cytometry.

[0394] Cell binding assays were carried out by initially incubating 200,000 cells with Nanobody-containing periplasmic preparation obtained in Examples 3 and 5 or relevant controls. After incubation, the cells were washed with FACS buffer. Cells were subsequently incubated successively with an in-house mouse anti-myc-tag monoclonal antibody and phycoerythrin labeled goat anti-mouse F(ab′)2 fragments (Jackson ImmunoResearch, Suffolk, UK). To omit signals arising from dead cells, a TOPRO-3 (Invitrogen, Paisley, UK) staining was carried out. Cells were finally analyzed on a BD FACSArray Bioanalyzer System (BD Biosciences, Franklin Lakes, N.J., US).

[0395] FIG. 3 depicts binding of several Nanobody constructs to SKBR3 cells as measured by flow cytometric analysis. It can be seen that the constructs 2A1, 2A3, 2C3, 2C5, 2D3 and 2G4 show clearly discernable shifts in fluorescence intensity as compared to the fluorescence intensity for cells incubated only with FACS buffer in the absence of any construct but with all appropriate detection agents as used for the detection of Nanobody constructs.

### Example 8

### Screening for Nanobodies that Compete with Herceptin® for HER2 Binding

[0396] A competition ELISA was performed to screen for Nanobodies that are able to inhibit the Herceptin® interaction with HER2. In this competition ELISA, the binding of 2 nM Herceptin® to SKBR3 vesicles was evaluated in the presence of a 1/20 dilution of Nanobody containing periplasmic extract obtained in the second selection described in Example 3. FIG. 4 shows an example of this competitive ELISA, identifying several clones that compete with binding of Herceptin® to HER2 expressed on SKBR3 vesicles.

[0397] Periplasmic extracts obtained in the second and ninth selection described in Example 3 and periplasmic extracts obtained in Example 5, were also screened in a Herceptin®-competitive homogeneous cell-based assay to evaluate the capacity of the expressed Nanobodies to block Herceptin® binding to HER2. The FMAT 8200 HTS system (Applied Biosystems, Foster City, Calif.) assay was performed as follows: SKBR3 cells expressing HER2 were grown in tissue culture flasks, collected and washed with screening buffer (PBS, 10% FCS) and resuspended in screening buffer at a concentration of 2.5×10⁵ cells/ml. Alexa 647-labeled Herceptin® was diluted to 62.5 ng/ml in screening buffer. Periplasmic extracts were diluted in screening buffer to obtain final dilutions of 4, 10, 40, 100, 200 and 400. To initiate the competitive screen, 10 μl labeled Herceptin®, 10 μl periplasmic dilution and 20 μl of cells were added to each well of FMAT system 384-well plates (PE Biosystems, Foster City, Calif.) The plates were scanned after 2 hours of incubation. A well was considered positive if it had a count of over 50 events. Screening of the extracts in this Herceptin® competitive homogeneous cell-based assay identified several clones (SEQ ID NOs: 1926-1988) that can block the binding of Herceptin® to HER2 with more than 90% (FIG. 5).

[0398] Purified Nanobodies were tested for inhibition of binding of Alexa647-labeled Herceptin® to HER2 expressed on SKBR3 cells. Serial dilutions of purified Nanobody (concentration range: 20 nM-10 pM) were added to SKBR3 cells together with 4×10⁻¹⁰ M Alexa647-labeled Herceptin® and incubated for 2 hours, after which plates were scanned. Herceptin® was included as reference (MoAb). Results are shown in FIG. 6. Dose-response curves were observed for all Nanobodies with IC₅₀-values ranging from 40 pM to 200 pM.

### Example 9

### Screening for Nanobodies that Compete with Omnitarg-Fab for HER2 Binding

[0399] Periplasmic extracts obtained in the sixth and seventh selection described in Example 3, were screened in an Omnitarg-Fab (OT-Fab) competitive homogeneous cell-based assay to evaluate the capacity of the expressed Nanobodies to block OT-Fab binding to HER2. The FMAT 8200 HTS system (Applied Biosystems, Foster City, Calif.) assay was performed as follows: SKBR3 cells expressing HER2 were grown in tissue culture flasks, collected and washed with screening buffer (PBS, 10% FCS) and resuspended in screening buffer at a concentration of 2.5×10⁵ cells/ml. Biotinylated OT-Fab was diluted in screening buffer to obtain a final concentration of 0.586 nM. The periplasmic extracts were diluted in screening buffer to obtain final dilutions of 100. To initiate the competitive screen, 5 μl labeled OT-Fab, 10 μl periplasmic dilution, 5 μl FMAT Blue dye-labeled streptavidin (100 ng/ml) and 20 μl of cells were added to each well of FMAT system 384-well plates (PE Biosystems, Foster City, Calif.). The plates were scanned after 2 hours of incubation. A well was considered positive if it had a count of over 50 events. Screening of the extracts in this OT-Fab competitive homogeneous cell-based assay identified clones that can block the binding of OT-Fab to HER2 with more than >90% (FIG. 7). Sequence analysis showed that all clones that blocked binding of OT-Fab HER2 are identical and represent a single Nanobody (SEQ ID NO: 1989).

### Example 10

### Screening of Kinetic Off-Rate Constants Via Surface Plasmon Resonance (BIAcore)

[0400] RhErbB2-Fc was immobilized on a CM5 sensor chip surface docked in Biacore 3000. Approximately 3600RU of rhErbB2-Fc was immobilized. Experiments were performed at 25° C. Periplasmic extracts were diluted 10-fold in running buffer (HBS-EP). The samples were injected for 1 min at a flow rate of 45 μl/min over the activated and reference surfaces. Those surfaces were regenerated with a 3 s pulse of glycine-HCl pH1.5+0.1% P20. As an example, the off rate (k_{off}) of different Nanobodies is documented in Table C-2.

### Example 11

### Anti-HER2Nanobodies can Block SKBR3 Cell Proliferation

[0401] The growth inhibitory characteristics of isolated Nanobodies were evaluated using the breast tumor cell line SKBR3. Briefly, SKBR3 cells were detached using 0.25% (vol/vol) trypsin and suspended in Dulbecco's Modified Eagle's Medium (DMEM) supplemented with 10% fetal calf serum (FCS), glutamine, and penicillin-streptomycin at a density of 1×10⁵ cells/ml. Aliquots of 200 μl (2×10⁴ cells) were plated into 96-well microdilution plates and allowed to adhere. After overnight adherence, cells were washed with serum-free medium and starved for 4 hours in 100 μl serum-free medium. Then, 100 μl of 1% FCS containing medium alone or medium containing Nanobody (final concentration of 50 nM) was added. After 2 days of incubation, cells were pulsed with 1 μCi [³H]-thymidine and incubated for an additional 24 h prior to freezing at −80° C. Cells were subsequently thawed and embedded on glass fiber membranes using a cell harvester (Perkin Elmer Life Sciences, Wellesley, Mass., USA). After several washings with water, filters were air-dried and counted using a γ-counter (Perkin Elmer Life Sciences). Nanobody 2A5 inhibited SKBR3 proliferation by about 18%. Up to 30% or more inhibition was achieved with Nanobodies 2C3, 2D3, 2A4 and 5F7 (FIG. 8).

### Example 12

### Generation of Multivalent/Multispecific Nanobody Formats

[0402] To potentially increase the biological effect of Nanobody molecules, bivalent constructs were fused head-to-tail using a GGGGSGGGS linker.

[0403] Here we describe the construction and characterization of bivalent Nanobodies consisting of two identical anti-HER2 molecules all separated by a 9 (GS) amino acid linker peptide. DNA segments encoding Nanobodies 2A4, 2A5, 2C3, 2D3, 5F7 were head-to-tail fused resulting in constructs 2A4-9GS-2A4, 2A5-9GS-2A5, 2C₃₋₉GS-2C3, 2D3-9GS-2D3, 5F7-9GS-5F7. Sequences of these bivalent constructs are listed in Tabel B-4. All Nanobodies were expressed in E. coli and purified according to standard protocols (see for example the prior art and applications filed by applicant cited herein).

[0404] The different bivalent Nanobody formats were screened in a Herceptin®-competitive homogeneous cell-based assay to evaluate their capacity to block Herceptin® binding to HER2 compared to their monovalent format. Briefly, 10 μl labeled. Herceptin® (62.5 ng/ml), 10 μl Nanobody dilution and 20 μl of cells (5×10³ cells) were added to each well of FMAT system 384-well plates (PE Biosystems, Foster City, Calif.). The plates were scanned after 2 hours of incubation. FIG. 9 shows that the bivalent constructs are more efficient in blocking the binding of Herceptin® to HER2-expressing SKBR3 cells as compared to their monovalent formats.

[0405] To test whether selected Nanobodies have potential as anticancer agents in an animal model, a strategy to increase the serum half life is preferred (as for example described in patent application WO 04/041865), since the serum half life of a mono- or bivalent Nanobody (approximately 15 or 30 KDa, respectively) is not optimal for this therapeutic indication. Human serum albumin specific Nanobody ALB1 (SEQ ID NO: 2266), cross reactive with mouse serum albumin, was chosen. Here we describe the construction of bispecific Nanobodies consisting an anti-HER2Nanobody and ALB1, all separated by a 9 (GS) amino acid linker peptide and resulting in constructs 2A4-9GS-ALB1, 2A5-9GS-ALB1, 2C₃₋₉GS-ALB1, 2D3-9GS-ALB1 and 5F7-9GS-ALB1. Sequences of these bispecific constructs are given in Table B-5.

[0406] To test whether the HER2-binding Nanobodies as disclosed herein above retain their biological activity in a more complicated molecular context such as a bispecific format, Nanobody formats were screened in a Herceptin®-competitive homogeneous cell-based assay to evaluate their capacity to block Herceptin® binding to HER2 compared to their monovalent and bivalent format. Based on the results shown in FIG. 9, it can be concluded that fusion of a Nanobody with different antigen specificity to a HER2-binding Nanobody does not affect the potency of the latter.

### Example 13

### Generation of Biparatopic Formats Combining a Herceptin®-Competing Nanobody with a Library of HER2 Binding Nanobodies

[0407] The structural requirement for multispecificity is to fuse two or more binding domains together, with sufficient flexibility to allow simultaneous binding to different target epitopes. The simplest bispecific is one that binds to two different and non-overlapping epitopes on the same target in such a way that simultaneous binding to the target is possible. Robert et al (Int. J. Cancer 1995, 28; 62(3): 283-90) have described the design of high avidity biparatopic antibodies directed against two different epitopes of the carcinoembryonic antigen. Binding of both arms simultaneously without a significant loss of entropy will endow ‘biparatopic’ antibodies with increased avidity and hence, increased binding affinity to the target. As a result, higher potency can be obtained as well as enhanced selectivity. In addition, careful selection of the epitopes targeted on the antigen by the biparatopic antibody or fragment thereof, combined with rational design of linkers to allow maximal flexibility of the two binding domains within the biparatopic antibody, may for example result in the blocking of two or more critical interaction sites of the target, leading to improved potency.

[0408] Using genetic fusion, one Herceptin®-competing Nanobody was combined with a repertoire of HER2-binding Nanobodies and this mini-repertoire was screened for biparatopics with improved binding activity and tumor cell growth inhibitory characteristics compared to the monovalent Herceptin®-competing Nanobody.

### 13.1 Construction of an Expression Vector for Biparatopic Design

[0409] For the construction of biparatope Nanobodies, an expression vector was adapted to contain the Herceptin®-competitive Nanobody 2D3 (which was shown to block cell proliferation between 20-30% as monovalent format (see Example 11) and which strongly competes with Herceptin® for binding to HER2-overexpressing SKBR3 cells) to which other Nanobodies with different HER2-binding specificities can be fused, spaced by a linker (FIG. 10). For the design of this vector, a 35 GS linker was used but other linker lengths can also be used to allow flexibility between the two building blocks. The 2D3 Nanobody is placed at the C-terminal end of the construct to allow SfiI-BstEII cloning of a full selection output. Alternatively, the 2D3 Nanobody can also be placed at the N-terminal end of the construct to allow cloning of a full selection output at the C-terminal end.

### 13.2 Generation of a Biparatopic Library

[0410] A full selection output retrieved from a selection on Herceptin®-captured rhErbB2/Fc followed by trypsin elution (Example 3.4), was unidirectionally cloned to the 2D3 Nanobody. Sequence analysis of a selected number of individual colonies derived from the selection output showed a good diversity in the repertoire: 16 Nanobody families were identified in 72 sequences. The ligation mix was transformed into E. coli cells and the transformation mix spread on selective agarose. Multiple individual subcolonies were picked and grown in 96-well deep well plates containing liquid selective medium by a QP Expression colony picker/rearrayer system (Genetix, New Milton, Hampshire, UK). Fourty-eight individual colonies were sequenced and analyzed. From 32 annotated sequenced, eight different Nanobody families were identified.

[0411] Periplasmic extracts (volume: ˜80 μl) were prepared according to standard methods (see for example the prior art and applications filed by applicant cited herein). The biparatopic Nanobodies were purified from the periplasmic extracts using PhyTip200⁺ columns (Phynexus, San Jose, Calif.) by a Tecan Eva Robotic system (Promega, Madison, US) and analyzed for their effects on SKBR3 tumor cell proliferation.

13.3 Effect of biparatopic Nanobodies on SKBR3 Cell Proliferation

[0412] The growth inhibitory characteristics of Nanobodies purified from periplasmic extracts by PhyTip200⁺ were evaluated using the breast tumor cell line SKBR3. Briefly, SKBR3 cells were detached using 0.25% (vol/vol) trypsin and suspended in DMEM supplemented with 10% fetal calf serum (FCS), glutamine, and penicillin-streptomycin at a density of 1×10⁵ cells/ml. Aliquots of 200 μl (2×10⁴ cells) were plated into 96-well microdilution plates and allowed to adhere. After overnight adherence, cells were washed with serum-free medium and starved for 4 hours in 100 μl serum-free medium. Then, 100 μl of 1% FCS containing medium alone or 90 μl of 1% FCS containing medium with 10 μl PhyTip200⁺ purified periplasmic extract or 50 nM Herceptin® was added. After 2 days of incubation, cells were pulsed with 1 μCi [³H]-thymidine and incubated for an additional 24 h prior to freezing at −80° C. Cells were subsequently thawed and embedded on glass fiber membranes using a cell harvester (Perkin Elmer Life Sciences, Wellesley, Mass., USA). After several washings with water, filters were air-dried and counted using a γ-counter (Perkin Elmer Life Sciences).

[0413] Herceptin® was able to inhibit cell proliferation of SKBR3 up to 50%. Different subclasses of biparatopic Nanobodies were identified: a group of biparatopic Nanobodies revealed an inhibitory effect on the ErbB2 overexpressing cell line SKBR3 to a lower extent than Herceptin®, a second group of biparatopic Nanobodies increased cell proliferation and a third group of biparatopic Nanobodies was able to inhibit cell proliferation of SKBR3 cells to an equal or greater extent than Herceptin®. FIG. 11 shows an example of this ‘single hit’ cell proliferation assay.

### Example 14

### Characterization of Biparatopic Nanobodies

[0414] The biparatopic molecules 28F6-35GS-2D3, 28G5-35GS-2D3, 29E9-35GS-2D3, 30D10-35GS-2D3, 27A5-35GS-2D3, 31D1′-35GS-2D3, 30E10-35GS-2D3, 27A3-35GS-2D3, 27B7-35GS-2D3, 27C₃₋₃₅GS-2D3, 27D1-35GS-2D3, 27E4-35GS-2D3, 27E7-35GS-2D3, 27H3-35GS-2D3, 27H4-35GS-2D3, 27H5-35GS-2D3 were expressed in E. coli as c-myc, His6-tagged proteins and subsequently purified from the culture medium by immobilized metal affinity chromatography (IMAC) and size exclusion chromatography (SEC). A control biparatopic Nanobody consisting of a dummy (i.e. not binding to HER2) Nanobody genetically fused to the 2D3 Nanobody, spaced by a 35GS linker was used as a control.

### 14.1 Biparatopic Nanobodies Display Improved Binding to HER2 as Compared to the Monovalent Building Blocks

[0415] The off-rate of the biparatopic Nanobodies was determined by surface plasmon resonance on a Biacore 3000 instrument. In brief, rhErbB2-Fc was immobilized on a CM5 sensor chip surface docked in Biacore 3000. Approximately 3600RU of rhErb B2-Fc was immobilized. Experiments were performed at 25° C. Nanobody binding was assessed at various concentrations. The samples were injected for 1 min at a flow rate of 45 μl/min over the activated and reference surfaces to allow for binding to chip-bound antigen. Next, binding buffer without Nanobody was sent over the chip at the same flow rate to allow for dissociation of bound Nanobody. After 10 min, remaining bound analyte was removed by injecting regeneration solution (Glycine/HCl pH1.5).

[0416] The monovalent 2D3 and biparatopic dummy-2D3 Nanobodies had similar off-rates in the range of 1E-3 1/s, indicating that fusion of a Nanobody to the N-terminal end of 2D3 does not interfere with binding of the latter (FIG. 12). The off-rate of bivalent 2D3-35GS-2D3 is in the range of 1E-4 1/s, indicating simultaneous binding of the two Nanobodies.

[0417] The off-rate of the biparatopic constructs 2B7-35GS-2D3, 27C3-35GS-2D3 and 27H5-35GS-2D3 are in the range of 1E-3 1/s (FIG. 13). These off-rates and the binding responses indicate binding by the 2D3 paratope, but lack of binding by the other paratope, either by non-specificity for rhErb2 or an extremely much lower affinity for rhErb2 compared to 2D3 or by sterical hindrance of the epitope by the Fc part or by the altered conformation after the immobilization procedure on the CM5 sensor chip.

[0418] Off-rates of the biparatopic constructs 2D3-35GS-2D3, 27D1-35GS-2D3, 27A3-35GS-2D3, 27E7-35GS-2D3 are in the range of 1E-4 1/s (FIG. 14). These off-rates indicate simultaneous binding of the 2 paratopes.

### 14.2 Herceptin®-Competitive Behavior of Biparatopic Nanobodies

[0419] Biparatopic Nanobodies were screened in a Herceptin®-competitive homogeneous cell-based assay to evaluate the capacity of the expressed Nanobodies to block Herceptin® binding to HER2. The FMAT 8200 HTS system (Applied. Biosystems, Foster City, Calif.) was used as described in Example 8. Bivalent 2D3-35GS-2D3 Nanobody more efficiently blocks binding of Herceptin® to HER2 as compared to monovalent 2D3 (FIGS. 15A and B). Likewise, biparatopic Nanobodies 27H3-35GS-2D3 and 27D1-35GS-2D3 block binding of Herceptin® to HER2 expressed on SKBR3 cells more efficiently than monovalent 2D3. Nanobodies 27A3, 27A5 and 30D 10 have no influence on the Herceptin®-competitive characteristic of Nanobody 2D3 when fused to its N-terminal end, spaced by a 35GS linker (FIG. 15B). Finally, Nanobodies 27B7, 27C3, 27H5 and the dummy Nanobody have an inhibitory effect on the Herceptin®-competitive potential of 2D3 (FIG. 15C).

14.3 Competitive Binding of Biparatopic Nanobodies with Omnitarg-Fab to HER2.

[0420] Biparatopic Nanobodies were screened in an Omnitarg-Fab competitive homogeneous cell-based assay to evaluate the capacity of the expressed Nanobodies to block Omnitarg-Fab binding to HER2. The FMAT 8200 HTS system (Applied Biosystems, Foster City, Calif.) was used as described in Example 9. Biparatopic Nanobodies 2D3-35GS-2D3, 27H3-35GS-2D3, 27D1-35GS-2D3, 27A3-35GS-2D3, 27A5-35GS-2D3 and 30D10-35GS-2D3 did not efficiently block the binding of biotinylated Omnitarg Fab (FIG. 16). Non-labeled Omnitarg-Fab inhibited binding of biotinylated Omnitarg-Fab in a dose-dependent manner.

### Example 15

### Biparatopic Nanobodies Comprising a Herceptin-Competitive and a HER2-Binding Nanobodies Inhibit SKBR3 Cell Proliferation

[0421] The growth inhibitory characteristics of biparatopic Nanobodies were evaluated using the breast tumor cell line SKBR3. Briefly, SKBR3 cells were detached using 0.25% (vol/vol) trypsin and suspended in DMEM supplemented with 10% fetal calf serum (FCS), glutamine, and penicillin-streptomycin at a density of 1×10⁵ cells/ml. Aliquots of 200 μl (2×10⁴ cells) were plated into 96-well microdilution plates and allowed to adhere. After overnight adherence, cells were washed with serum-free medium and starved for 4 hours in 100 μl serum-free medium. Then, 100 μl of 1% FCS containing medium alone or 90 μl of 1% FCS containing medium with serial dilutions of IMAC/SEC purified biparatopic Nanobodies, monovalent 2D3 or 50 nM Herceptin® was added. After 2 days of incubation, cells were pulsed with 1 μCi [³H]-thymidine and incubated for an additional 24 h prior to freezing at −80° C. Cells were subsequently thawed and embedded on glass fiber membranes using a cell harvester (Perkin Elmer Life Sciences, Wellesley, Mass., USA). After several washings with water, filters were air-dried and counted using a γ-counter (Perkin Elmer Life Sciences).

[0422] Biparatopie Nanobodies are able to inhibit cell proliferation of SKBR3 cells to an equal or greater extent than Herceptin®. FIG. 17 shows an example of this cell proliferation assay.

### Example 16

### Biparatopic Nanobodies Comprising a Herceptin®-Competitive and a HER2-Binding Nanobody Inhibit AKT Signal Transduction in SKBR3 Breast Cancer Cells

[0423] Upon overexpression, HER2 may be activated by homodimerisation. HER2 plays a major regulatory role in the signalling network involved in many cellular processes, including the p21Ras/Mitogen-Activated Protein Kinase (MAPK) and PI3K/AKT pathways. Treatment of HER2 overexpressing SKBR3 cells with Herceptin® results in reduction in HER2 phosphorylation which is linked to inhibition of AKT phosphorylation.

[0424] To assess the effect of biparatopic Nanobodies on the AKT pathway in SKBR3 cells, cells were plated in 2% serum containing medium in 24-well culture plates. The next day, medium was refreshed and 50 nM of either biparatopic Nanobody, Herceptin®, monovalent 2D3 Nanobody or medium alone was added and incubated for 16 h. The reaction was stopped by aspirating the cell medium. Cells were lysed by addition of lysis buffer (20 mM NP40, 20 mM Tris-HCl pH8, 10% glycerol, 2 mM EDTA, 1 mM sodium orthovanadate, complete protease inhibitor cocktail, 1% PBS). Protein concentration in the lysates was measured using BCA protein assay kit (Pierce) according to the manufacturer's indications. Equal amounts of protein were run on 10% polyacrylamide gels and electroblotted onto Invitrolon PVDF membranes (Invitrogen, Paisley, UK). The presence of poshorylated AKT was assessed by probing the blots with Phospho-AKT (Ser473) antibody (Cell Signaling, Danvers, Mass.) and total AKT was detected using AKT antibody (Cell Signaling). The blots were visualized using a chemiluminescent substrate (Perkin Elmer, Wellesley, Mass., USA).

[0425] As shown in FIG. 18, biparatopic Nanobodies 27A5-35GS-2D3 and 27A3-35GS-2D3 significantly block AKT activation in SKBR3 cells, whereas dummy-2D3 biparatopic and monovalent 2D3 Nanobody do not have a visible effect on AKT signalling.

### Example 17

### Construction of Biparatopic Nanobodies Combining Herceptin®- and Omnitarg Competitive Nanobodies

[0426] For the construction of biparatopics consisting of a Herceptin®-competitive and Omnitarg-competitive Nanobody, the expression vector described in Example 13.1 was used. Herceptin®-competitive Nanobodies 2D3 and 5F7 were cloned either at the C-terminal or N-terminal end of Omnitarg-competitive Nanobody 47D5, spaced by a 35GS linker. Biparatopic Nanobodies 2D3-35GS-47D5, 47D5-35GS-2D3, 5F7-35GS-47D5 and 47D5-35GS-5F7 were expressed in E. coli as c-myc, His6-tagged proteins and subsequently purified from the culture medium by immobilized metal affinity chromatography (IMAC) and size exclusion chromatography (SEC). Two control biparatopic Nanobody consisting of a dummy Nanobody genetically fused to the 2D3 or 47D5 Nanobody, spaced by a 35GS linker were used as controls.

### Example 18

### Characterization of Biparatopic Formats Combining Herceptin®- and Omnitarg Competitive Nanobodies

### 18.1 Biacore Analysis

[0427] A kinetic analysis for 2D3, 5F7 and 47D5 was performed on Biacore to determine the binding affinity to HER2. In addition, the influence of a dummy Nanobody fused to the N-terminal end of 2D3 and 47D5 on the binding characteristics of the latter to HER2, was analyzed. rhErbB2-Fc was immobilized on a CM5 sensor chip surface docked in T100. Approximately 3600RU of rhErbB2-Fc was immobilized. Experiments were performed at 25° C. Different concentrations of Nanobody (100 nM-0.78 nM) were made in running buffer (HBS-EP). The samples were injected for 1 min at a flow rate of 45 μl/min over the activated and reference surfaces.

[0428] In Table 2 an overview of k_{d}/k_{off}, kₐ, and K_{d} values for the Nanobodies is shown. Fusion of a Nanobody at the N-terminal end of the Nanobodies 2D3 and 47D5 does not significantly alter the binding characteristics of these Nanobodies to HER2.

[0429] The binding of the biparatopic 2D3-35GS-47D5 to HER2 was compared to the binding of the monovalent building blocks 2D3 and 47D5. Hereto, approximately 90 RU of the respective Nanobodies were immobilized and different concentrations (100-1000 nM) HER2-ECD was injected. As shown in Table C-4, the off-rate of the HER2-ECD from the 2D3-47D5 surface was 25× lower than the off-rate on each of the 2D3 and 47D5 surfaces, indicating an avidity effect caused by binding of HER2-ECD on both the 2D3 and 47D5 Nanobodies simultaneously (FIG. 19).

### 18.2 Biparatopic Nanobodies Combining Herceptin®- and Omnitarg Competitive Nanobodies Inhibit Heregulin-Mediated HER2-HER3 Signaling

[0430] After ligand-binding, the HER receptors become activated by receptor dimerization between either two identical receptors (homodimerization) or different receptors of the same family (heterodimerization). After receptor dimerization, activation of the intrinsic protein kinase activity and tyrosine autophosphorylation occurs, recruiting and phoshphorylating several intracellular substrates involving the Ras-Raf-MAPK, the PI3K/Akt, and other signaling pathways that regulate multiple biological processes including apoptosis and cellular proliferation. The mitogen-activated protein kinases (Erk1/Erk2) are one of the key endpoints in signal transduction pathways that ultimately trigger cancer cells to divide.

[0431] The ability of the biparatopic Nanobodies combining Herceptin® and Omnitarg-competitive Nanobodies to inhibit heregulin (HRG) activation of MAPK-Erk1/Erk2 was assessed in the following way. MCF7 cells (5×10⁴/well) were plated in serum-containing media in 24-well culture plates. The next day, media were removed and fresh media containing 0.1 serum were added to each well. The next day, prior to the assay, the media were replaced with serum-free medium. Cells were then incubated for 30 min with 50 nM of biparatopic Nanobody 2D3-35GS-47D5, 47D5-35GS-2D3, 5F7-35GS-47D5 or 47D5-35GS-5F7, monovalent 2D3, 5F7 or 47D5, Omnitarg-Fab or Herceptin®. Cells were then treated with 0.2 nM HRG for 15 min. The reaction was stopped by aspirating the cell medium. Cells were lysed by addition of lysis buffer (20 mM NP40, 20 mM Tris-HCl pH8, 10% glycerol, 2 mM EDTA, 1 mM sodium orthovanadate, complete protease inhibitor cocktail, 1% PBS). Protein concentration in the lysates was measured using BCA protein assay kit (Pierce) according to the manufacturer's indications. Equal amounts of protein were run on 10% polyacrylamide gels and electroblotted onto Invitrolon PVDF membranes (Invitrogen, Paisley, UK). The presence of poshorylated Erk1/Erk2 (p44/42 MAPK) was assessed by probing the blots with phosphor-p44/42 MAPK (Thr202/Tyr204) antibody (Cell Signaling, Danvers, Mass.) and total MAPK was detected using p44/42 MAP kinase (137F5) rabbit mAb (Cell Signaling). The blots were visualized using a chemiluminescent substrate (Perkin Elmer, Wellesley, Mass., USA).

[0432] As shown in FIG. 20, biparatopic Nanobodies 2D3-35GS-47D5 and 5F7-35GS-47D5 significantly block HRG-mediated activation of MAPK to a greater extent than Omnitarg-Fab and Herceptin®. Surprisingly, when the Omnitarg-competing Nanobody 47D5 comprised the N-terminal Nanobody in the biparatopic constructs, i.e 47D5-35GS-2D3 and 47D5-35GS-5F7, no significant reduction in MAPK activation could be observed. Monovalent Nanobodies 2D3, 5F7 and 47D5 could not block HRG-mediated MAPK activation in MCF-7 cells.

[0433] These data suggest that the position of the Nanobodies within the biparatopic Nanobody greatly influences the potency of the molecule. In addition, the length of the linker used to genetically fuse 2 Nanobodies biparatopic may be critically important to provide maximal flexibility between the 2 Nanobodies to allow tight binding to their respective binding epitope on HER2.

[0434] Biparatopic Nanobodies 2D3-35GS-47D5 and 5F7-35GS-47D5 were also shown to inhibit heregulin (HRG)-dependent Akt activation (FIG. 21). Activation of the PI3K signal transduction pathway is important for cell survival. Complexes formed between HER2 and either HER3 or EGFR can initiate these pathways in response to HRG. Incubation of MCF7 breast cancer cells with biparatopic Nanobodies 2D3-35GS-47D5 or 5F7-35GS-47D5 inhibited HRG-mediated Akt activation to a greater extent than Omnitarg-Fab or Herceptin®. These data suggest that the biparatopic Nanobodies 2D3-35GS-47D5 or 5F7-35GS-47D5 may inhibit HER2 ligand-activation of PI3 kinase and that this inhibition may lead to apoptosis.

### Example 19

### In-Silica Design of Optimal Linker Lengths in Biparatopic Nanobody Formats

[0435] In-silico design of optimal linker lengths for a biparatopic Nanobody format may for example be performed as follows. The 3-dimensional (3D) coordinates of the binding mode of each individual Nanobody to its respective epitope on the target are determined, for example from:
[0436] a. a structure of the Nanobody-target complex determined by X-ray experiments or NMR experiments.
[0437] b. a docking model of each Nanobody binding on their respective epitope on the target. Also a number of potential binding modes of each Nanobody to the target derived from docking studies can be used. Docking can be done by e.g ZDock (Chen and Weng 2002, Proteins 47(3): 281-294; Chen and Weng 2003, Proteins 51(3): 397-408; Chen et al. 2003, Proteins 52(1): 80-87) and refined by RDock (Li et al. 2003, Proteins 53(3): 693-707) or by other methods (Fernandez-Recio et al. 2003, Proteins 52(1): 113-117).
[0438] c. Binding mode of each Nanobody can be extracted from the same structure or from separate complexes. In the latter case, the binding modes of each Nanobody on a different epitope on the same target can be deduced by structural superposition of the different complexes.

[0439] A linker with a given sequence and thus of given length can be modelled between the 2 Nanobodies in different ways:
[0440] a. By homology modelling (Safi, and Blundell J. 1993, Mol. Biol. 234: 779-815)
   [0441] i. The sequence of a construct Nanobody1-linker-Nanobody2 or Nanobody2-linker-Nanobody 1 is drawn and stored in a readable sequence format (e.g. Fasta)
   [0442] ii. The 3-dimensional coordinates of the biparatopic construct is built by homology modelling by using the 3-dimensional coordinates (from X-ray, NMR or docking experiments) of the individual binding modes of the Nanobodies as a template.
[0443] b. By de-novo design. A linker between the 2 Nanobodies binding on a different epitope on the same target can be build by de-novo design (Hu, et al. 2007, Proc. Natl. Acad. Sci. USA 104(45): 17668-17673).
[0444] c. Several conformations of the linker are sampled and the lowest state energy conformations (1 or more) can be considered.

[0445] As a non-limiting example, the above was performed for a biparatopic construct comprising two Nanobodies. The modelling is shown in FIGS. 22A and 22B, which show a model of Nanobody 2D3 (blue) linked to another Nanobody (cyan) docked on HER-2 (red). Both figures show that we can dock a Nanobody to a target and predict its binding mode to the target. When doing this for several. Nanobodies binding on non-overlapping epitopes on the same target, we can design a linker between the Nanobodies to create a multivalent Nanobody construct.

[0446] The 3-dimensional coordinates of the in-silico generated linker in the biparatopic construct are evaluated on at least one of the following criteria:
[0447] a. Internal energy strain of the linker; possibly compared to a set of generated linkers of the same sequence in the free state. At least one but preferentially several energy terms are used (e.g. Van der Waals energy, electrostatics energy, dihedral angle deformation energy, etc.). To calculate the energy values an atom-based force-field (e.g. CHARMM (Brooks et al. 1983, J. Comp. Chem. 4: 187-217)) or other means of calculating potential energy (e.g. potentials of mean force (Muegge and Martin 1999, J. Med. Chem. 42: 791)) can be used.
[0448] b. Internal energy strain on at least one of the residues (amino-acids) of the linker. For three biparatopic constructs 5F7-35GS-47D5, 47D5-35GS-5F7 and 47D5-40GS-5F7 energy penalty values were calculated for each residue in the linker as well as for 10 residues of each Nanobody connected to the linker. Energy values are shown in FIGS. 22, 23 and 24.
[0449] c. The root-mean square deviation (RMSD) between the 3-dimensional coordinates of the 2 Nanobodies in the biparatopic construct and the 2 Nanobodies in their non-linked (monovalent) binding mode. The higher this value the less likely this linker is appropriate. FIG. 25 shows the backbone RMSD (Å²) between the 5F7-linker-47D5 constructs (built by homology modelling) with the individual Nanobodies 5F7 and 47D5 in their unlinked binding mode. The linker length varies from 5 to 35. FIG. 25A shows that the RMSD-value is at a minimum value with linker lengths larger or equal to 15 residues. When shorter linkers are used (e.g. linker length=5, 10) we see an increased RMSD indicating that the Nanobodies in the bivalent construct are deviating from their monovalent binding mode. These in-silico experiments suggest that biparatopic constructs with linker lengths lower than 15 residues will have a significant deviation from the optimal binding mode of the individual Nanobodies to the target. In FIG. 25B a ribbon view is shown of the 5F7-linker-47D5 biparatopic construct for 2 linker lengths. The binding mode of the individual Nanobodies is shown in blue; the biparatopic constructs are in red. When a 35GS linker is used between the 2 Nanobodies and a very limited deviation from the individual binding modes is observed. However, when a 5GS linker is used, both Nanobodies in the biparatopic construct significantly deviate from their optimal binding mode.
[0450] d. Scores from scoring functions in homology modelling protocols which are derived based on a combination of experimental data and in-silico results (SalI & Overington, Protein Science 3(9):1582-1596, 1994).

[0451] As can be seen from the above results, the linker in this specific example should preferably be at least 15 amino acids in length, with linkers of between 20 and 40 amino acid residues, such as about 25, 30 or 35 amino acid residues, being particularly suited.

[0452] Also, constructs with different potentially suitable linker lengths (as determined by the above in silico analysis) may be prepared and tested for affinity/avidity, specificity, or potency using suitable binding assays or in vitro or in vivo potency assays, for example those mentioned in the present specification. In this way, optimal linker length may be determined, confirmed or verified.

### Example 20

### Construction of Multiparatopic Nanobodies for Broader Biological Activity

[0453] Simultaneous binding of 2 adjacent, non-overlapping epitopes by both arms of a biparatopic Nanobody without significant loss of entropy endows biparatopic Nanobodies with increased binding affinity to the target and as a result, higher potency can be obtained. For persons skilled in the art, it is evident that the engineering of Nanobody fragments to obtain an increased potency or broader activity is not limited to the construction of biparatopic Nanobody fragments. Engineering of triparatopic and even tetratopic Nanobodies with careful selection of the epitopes targeted on the antigen, combined with selction of linkers to allow maximal flexibility of the binding domains within the multiparatopic antibody, may for example result in the blocking of several critical interaction sites of the target, leading to improved potency and even an unparalleled biological activity.

### Tables

TABLE B-1
Preferred Nanobodies against HER2 obtained as described in Example 3

| | | ; PRT | |
|---|---|---|---|
| < Name | , SEQ ID NO: # | (protein) | Amino acid sequence |
| < 13D11 | , SEQ ID NO: 1926 | ; PRT; -> | EVQLVESGGGLVHPGGSLRLSCVGSGFSLDDYGM |
| | | | TWVRRAPGKGLEWVSSINWSGTHTDYADSVKGRF |
| | | | TISRDNAKNTLFLQMNSLNPEDTAVYYCGQGWKI |
| | | | VPTNPRGHGTQVTVSS |
| < 2B4 | , SEQ ID NO: 1927 | ; PRT; -> | EVQLVESGGGLVQPGGSLRLSCVGSGFSLDDYAM |
| | | | TWVRQAPGKGLEWVSSINWSGTHTDYADSVKGRF |
| | | | TISRDNAKNTLFLQMNSLSPEDTAVYYCNQGWKI |
| | | | RPTIPMGHGTQVTVSS |
| < 2G2 | , SEQ ID NO: 1928 | ; PRT; -> | EVQLVESGGGLVQPGGSLRLSCVASGFSLDDYGM |
| | | | TWVRQAPGKGLEWVSSINWSGTHTDYTDPVKGRF |
| | | | TISRDNAKNTLFLQMNNLTPEDTAVYYCNRGWKI |
| | | | VPTDLGGHGTQVTVSS |
| < 13D2 | , SEQ ID NO: 1929 | ; PRT; -> | EVQLVESGGGLVQPGGSLRLSCVASGFSLDDYGM |
| | | | TWVRQAPGKGLEWVSSINWSGTHTDYADSVKGRF |
| | | | TISRDNAKNTLFLQMNNLRSEDTAVYSCNQGWKI |
| | | | VPTDRGGHGTQVTVSS |
| < 2D5 | , SEQ ID NO: 1930 | ; PRT; -> | EVQLVESGGGLVQPGGSLRLSCVASGFSLDDYGM |
| | | | TWVRQAPGKGLEWVSSINWSGTHTDYADSVKGRF |
| | | | TISRDNAKNTLFLQMNSLRSEDTAVYYCNQGWKI |
| | | | VPTDRGGHGTQVTVSS |
| < 2F4 | , SEQ ID NO: 1931 | ; PRT; -> | EVQLVESGGGLVQPGGSLRLSCVASGFSLDDYGM |
| | | | TWVRQAPGKGLEWVSSINWSGTHTDYADSVKGRF |
| | | | TISRDNAKNTLFLQMNSLRSEDTAVYYCNQGWKI |
| | | | VPTDRRGHGTQVTVSS |
| < 2C3 | , SEQ ID NO: 1932 | ; PRT; -> | EVQLVESGGGLVQPGGSLRLSCVASGFSLDDYGM |
| | | | TWVRQAPGKGLEWVSSINWSGTHTDYADSVKGRF |
| | | | TISRDNAKNTLFLQMNSLRSEDTAVYYCNQGWKI |
| | | | VPTDRTGHGTQVTVSS |
| < 17E3 | , SEQ ID NO: 1933 | ; PRT; -> | EVQLVESGGGLVQAGGSLRLSCVASKMTFMRYTM |
| | | | GWYRQAPGKQRDLVASIDSSGGTNYADSVKGRFT |
| | | | ISRDNAKNTVYLEMNSLTPEDTAVYYCNQGWKIV |
| | | | PTDRTGHGTQVTVSS |
| < 17H3 | , SEQ ID NO: 1934 | ; PRT; -> | EVQLMESGGGLVQPGGSLRLSCVASGFSLDDYGM |
| | | | TWVRQAPGKGLEWVSSINWSGTHTDYADSVKGRF |
| | | | TISRDNAKNTLFLQMNSLRSEDTAVYYCNQGWKI |
| | | | VPTDRGGHGTQVTVSS |
| < 17D2 | , SEQ ID NO: 1935 | ; PRT; -> | EVQLVESGGGLVQPGGSLRLSCVASGFSLDDYGM |
| | | | TWVRQAPGKGLEWVSSINWSGTHTDYADSVKGRF |
| | | | TISRDNAKNTLFLQMNSLRSEDTAVYYCNQGWKI |
| | | | VPTDRGSHGTQVTVSS |
| < 2F1 | , SEQ ID NO: 1936 | ; PRT; -> | EVQLVESGGGLVQPGGSLRLSCVASGFSLDDYGM |
| | | | TWVRQAPGKELEWISSINWSGTHTDYADSVKGRF |
| | | | TISRDNAKNTLFLQMNSLTPEDTAVYYCNQGWKI |
| | | | VPMDRRGHGTQVTVSS |
| < 2E2 | , SEQ ID NO: 1937 | ; PRT; -> | EVQLVESGGGLVQPGGSLRLSCVASGFSLDDYGM |
| | | | TWVRQAPGKGLEWVSSINWSGTHTDYADSVKGRF |
| | | | TISRDNAKNTLFLQMNSLTPEDTAVYYCNQGWKI |
| | | | IPTDRRGHGTQVTVSS |
| < 2C2 | , SEQ ID NO: 1938 | ; PRT; -> | EVQLVESGGGLVQPGGSLRLSCVASGFSLDDYAM |
| | | | TWVRQAPGKGLEWVSSINWSGTHTDYADSVKGRF |
| | | | TISRDNARNTLFLQMNSLTPEDTAIYYCNQGWKI |
| | | | LPTDRRGHGTQVTVSS |
| < 2E3 | , SEQ ID NO: 1939 | ; PRT; -> | EVQLVESGGGLVQPGGSLRLSCVASGFSLDDYGM |
| | | | TWVRQAPGKGLEWVSSINWSGTHTDYADSVKGRF |
| | | | TISRDNAKNTLFLQMNSLSPEDTAVYYCNQGWKI |
| | | | LPTNRGSHGTQVTVSS |
| < 13B10 | , SEQ ID NO: 1940 | ; PRT; -> | EVQLVESGGGLVQPGGSLRLSCVASGFSLDDYGM |
| | | | TWVRQAPGKGFEWVSSINWSGTHTDYADSVKGRF |
| | | | TISRDNAKNTLFLQMNSLSPEDTAVYYCNQGWKI |
| | | | LPTNRGSHGTQVTVSS |
| < 2D1 | , SEQ ID NO: 1941 | ; PRT; -> | EVQLVESGGGLVQPGGSLRLSCVASGFSLDDYGM |
| | | | TWVRQAPGKGLEWVSSINWSGTHTDYADSVKGRF |
| | | | TISRDNAKNTLFLQMNSLSPEDTAVYYCNRGWKI |
| | | | LPTNRGSHGTQVTVSS |
| < 2H3 | , SEQ ID NO: 1942 | ; PRT; -> | EVQLVESGGGLVQPGGSLRLSCVASGFSLDDYGM |
| | | | TWVRQAPGKGLEWVSSINWSGTHTDYADSVKGRF |
| | | | TISRDNAKNTLFLQMNSLTPEDTAVYYCNQGWKI |
| | | | IPTDRRGHGTQVTVSS |
| < 2H1 | , SEQ ID NO: 1943 | ; PRT; -> | EVQLVESGGGLVQPGGSLRLSCVASGFSLDDYGM |
| | | | TWVRQAPGKGLEWVSSINWSGTHTDYADSVRGRF |
| | | | VISRDNAKNTLFLQMNSLSPEDTAVYYCNQGWKI |
| | | | IPTDRRGHGTQVTVSS |
| < 2C1 | , SEQ ID NO: 1944 | ; PRT; -> | EVQLVESGGGLVQPGGSLRLSCVASGFSLDDYGM |
| | | | TWVRQAPGKGLEWVSSINWSGTHTDYTDSVKGRF |
| | | | TISRDNAKNTLFLQMNSLTPEDTAVYYCNQGWKI |
| | | | IPTDRRGHGTQVTVSS |
| < 15C5 | , SEQ ID NO: 1945 | ; PRT; -> | EVQLVESGGGLVQPGGSLKLSCVASGFSLDDYGM |
| | | | TWVRQAPGKGLEWVSSINWNVTHTDYAYSVKGRF |
| | | | TISRDNAKNTLFLQMNSLTPEDTAVYYCNQGWKI |
| | | | IPTDRRGHGTQVTVSS |
| < 2B3 | , SEQ ID NO: 1946 | ; PRT; -> | EVQLVESGGGLVQPGGSLRLSCVASGFSLDDYGM |
| | | | TWVRQAPGKGLEWVSSINWSGTHTDCADSVKGRF |
| | | | TISRDNAKNTLFLQMNSLTPEDTAVYYCNQGWKI |
| | | | IPTDRRGHGTQVTVSS |
| < 29H2 | , SEQ ID NO: 1947 | ; PRT; -> | EVQLVESGGGLVQPGGSLRLSCVASGFSLDDYGM |
| | | | TWVRQAPGKGLEWVSSINWSGTHTDYADSVKGRF |
| | | | TISRDNAKNTLFLQMNNLTPEDTAVYYCNQGWKI |
| | | | IPTDRRGHGTQVTVSS |
| < 17E4 | , SEQ ID NO: 1948 | ; PRT; -> | EVQLVESGGGLVQPGGSLRLSCVASGFSLDDYGM |
| | | | TWVRQAPGKGLEWVSSINWSGTHTDYADSVKGRF |
| | | | VISRDNAKNTLFLQMNSLSPEDTAVYYCNQGWKI |
| | | | IPTDRRGHGTQVTVSS |
| < 17A2 | , SEQ ID NO: 1949 | ; PRT; -> | EVQLVESGGGLVQPGGSLRLSCVASGFSLDDYAM |
| | | | TWVRQAPGKGLEWVSSINWSGTHTDYADSVKGRF |
| | | | TISRDNAKNTLFLQMNSLSPEDTAVYYCNKGWKV |
| | | | WPTDRGTHGTQVTVSS |
| < 15D1 | , SEQ ID NO: 1950 | ; PRT; -> | EVQLVESGGGLVQPGGSLRLSCVASGFSLDDYAM |
| | | | TWVRQAPGKGLEWVSSINWSGTHTDYADSVKGRF |
| | | | TISRDNAKNTLFLQMNSLNPEDTAVYYCNQGWKV |
| | | | WPTDRGTHGTQVTVSS |
| < 17B8 | , SEQ ID NO: 1951 | ; PRT; -> | EVQLVESGGGLVQPGGSLRLSCVASGFSLDDYGM |
| | | | TWVRQAPGKGLEWVSSINWSGTHTDYADSVKGRF |
| | | | TISRDNAKNTLFLQMNSLTPEDTAVYYCNQGWKI |
| | | | LPAERRGHGTQVTVSS |
| < 15C11 | , SEQ ID NO: 1952 | ; PRT; -> | EVQLVESGGGLVQPGGSLRLSCVASGFSLDDYGM |
| | | | TWVRQAPGKGLEWVSSINWSGTHTDYADSVKGRF |
| | | | TISRDNAKNTLFLQMNSLTPEDTAVYYCNQGWKI |
| | | | LPAERRGHGTPVTVSS |
| < 15G8 | , SEQ ID NO: 1953 | ; PRT; -> | EVQLVESGGGLVQPGGSLKLSCVASGFSLDDYGM |
| | | | TWVRQAPGKGLEWVSSINWNGTHTDYAYSVKGRF |
| | | | TISRDNAKNTLFLQMNSLTPENTAVYYCNQGWKI |
| | | | LPAERRGHGTQVTVSS |
| < 17H4 | , SEQ ID NO: 1954 | ; PRT; -> | EVQLVESGGGLVQPGGSLRLSCVASGFSLINYAM |
| | | | TWVRQAPGKGLEWVSSINWSGTHTDYADSVKGRF |
| | | | TISRDNAKNTLFLHMNNLSPEDTAVYYCGQGWKI |
| | | | HPADRGGHGTQVTVSS |
| < 27G8 | , SEQ ID NO: 1955 | ; PRT; -> | EVQLVESGGGLVQPGGSLRLSCVASGFSLDDYGM |
| | | | TWVRQAPGKGLEWVSSINWSGTHTDYADSVKGRF |
| | | | TISRDNAKNTLFLQMNSLTPEDTAVYYCNQGWKI |
| | | | LPAERRGHGTQVTVSS |
| < 38C6 | , SEQ ID NO: 1956 | ; PRT; -> | EVQLVESGGGLVQPGGSLRLSCVGSGFSLDDYAM |
| | | | TWVRQAPGKGLEWVSSINWSGTHTDYADSVKGRF |
| | | | TISRDNAKNTLFLQMNSLSPEDTAVYYCNQGWKI |
| | | | RPTIPMGHGTQVTVSS |
| < 2A4 | , SEQ ID NO: 1957 | ; PRT; -> | EVQLVESGGGLVQPGGSLRLSCAASGFIFDDYAM |
| | | | SWVRQAPGKGLEWVSAINWSGSHRNYADSVKGRF |
| | | | TISRDNAKKTVYLQMNSLQSEDTAVYYCGTGWQS |
| | | | TTKNQGYWGQGTQVTVSS |
| < 15G7 | , SEQ ID NO: 1958 | ; PRT; -> | EVQLVESGGGLVQPGGSLRLSCAASGFIFDDYAM |
| | | | SWVRQAPGKGLEWVSAINWSGTHRNYADSVKGRF |
| | | | TISRDNNKKTVYLQMNSLKSEDTAVYYCATGWQS |
| | | | TTKNQGYWGQGTQVTVSS |
| < 15B7 | , SEQ ID NO: 1959 | ; PRT; -> | EVQLVESGGGLVQPGGSLKLSCAASGFIFDDYAM |
| | | | SWVRQAPGKGLEWVSAINWSGSHRNYADSVKGRF |
| | | | TISRDNAKKTVYLQMNSLQSEDTAVYYCGTGWQS |
| | | | TTKSQGYWGQGTQVTVSS |
| < 5G4 | , SEQ ID NO: 1960 | ; PRT; -> | EVQLVESGGGLVQPGGSLTLSCAGSGFIFDDYAM |
| | | | SWVRQAPGKGLEWVSSINWSGSHRNYADSVKGRF |
| | | | TISRDNAKKTLYLQMNSLKSEDTAVYYCATGWQS |
| | | | TTKNQNYWGQGTQVTVSS |
| < 13B2 | , SEQ ID NO: 1961 | ; PRT; -> | EVQLVESGGSLVQPGGSLRLSCAASGFTFDDYAM |
| | | | SWVRQAPGKGLEWISSINWSGTHKDYADSVKGRF |
| | | | TISRNNANNTLYLQMNNLKFEDTAVYYCAKNWRD |
| | | | AGTTWFEKSGSAGQGTQVTVSS |
| < 2E5 | , SEQ ID NO: 1962 | ; PRT; -> | EVQLVESGGSLVQPGESLRLSCAASGFTFDDYAM |
| | | | SWVRQAPGKGLEWISSINWSGTHTDYADSVKGRF |
| | | | TISRNNANNTLYLQMNNLKFEDTAVYYCAKNWRD |
| | | | AGTTWFEKSGSAGQGTQVTVSS |
| < 15G1 | , SEQ ID NO: 1963 | ; PRT; -> | EVQLVESGGSLVPPGGSLRLSCAASGFTFDDYAM |
| | | | SWVRQAPGKGLEWVSSINWSGTHTDYTDSVKGRF |
| | | | TISRNNANNTLYLQMNSLKSEDTAVYYCAKNWRD |
| | | | AGTTWFEKSGSAGQGTQVTVSS |
| < 27B1 | , SEQ ID NO: 1964 | ; PRT; -> | EVQLVESGGSLVQPGGSLRLSCAASGFTFDDYAM |
| | | | SWVRQAPGKGLEWISSINWSGTHTDYADSVKGRF |
| | | | TISRNNANNTLYLQMNNLKFEDTAVYYCAKNWRD |
| | | | AGTTWFEKSGSAGQGTQVTVSS |
| < 17E7 | , SEQ ID NO: 1965 | ; PRT; -> | EVQLVESGGSLVQPGGSLRLSCAASGFTFDDYAM |
| | | | SWVRQVPGKGLEWVSSINWSGTHTDYADSVKGRF |
| | | | TISRNNANNTLYLQMNSLKSEDTAVYYCAKNWRD |
| | | | AGTTWFEKSGSAGQGTQVTVSS |
| < 17D8 | , SEQ ID NO: 1966 | ; PRT; -> | EVQLVESGGSLVPPGGSLRLSCAVSGFTFDDYAM |
| | | | SWVRQAPGKGLEWVSSINWSGTHTDYTDSVKGRF |
| | | | TISRNNANNMLYLQMNSLKSEDTAVYYCAKNWRD |
| | | | AGTTWFEKSGSAGQGTQVTVSS |
| < 5F8 | , SEQ ID NO: 1967 | ; PRT; -> | EVQLVESGGSLVQPGGSLRLSCAASGFTFDDYAL |
| | | | SWVRQAPGKGLEWISSINWSGTHTDYADSVKGRF |
| | | | TISRNNANNTLYLQMNNLKFEDTAVYYCAKNWRD |
| | | | AGTTWFEKSGSAGQGTQVTVSS |
| < 2D4 | , SEQ ID NO: 1968 | ; PRT; -> | EVQLVESGGSLVQPGGSLRLSCAASGFTFDDYAM |
| | | | TWVRQAPGKGLEWVSSINWSGTHTDYADSVKGRF |
| | | | TISRNNANNTLYLQMNSLKSDDTAVYYCAKNWGD |
| | | | AGTTWFEKSGSAGPGTQVTVSS |
| < 13D8 | , SEQ ID NO: 1969 | ; PRT; -> | EVQLVESGGSLVQPGGSLRLSCAASGFTFDDYAM |
| | | | TWVRQASGKGLEWVSSINWSGTHTDYTDSVKGRF |
| | | | TISRNNANNTLYLQMNSLKSEDTAVYYCAKNWGD |
| | | | AGTTWFEKSGSAGQGTQVTVSS |
| < 17G8 | , SEQ ID NO: 1970 | ; PRT; -> | EVQLVESGGSLVPPGGSLRLSCAASGFTFDDYAM |
| | | | SWVRQAPGKGLEWVSSINWSGTHTGYTDSVKGRF |
| | | | TISRNNANNTLYLQMNSLKSEDTAVYYCAKNWGD |
| | | | AGTTWFEKSGSAGQGTQVTVSS |
| < 2H4 | , SEQ ID NO: 1971 | ; PRT; -> | EVQLVESGGSLVQPGGSLRLSCAASGFTFDDYAM |
| | | | TWVRQAPGKGLEWVSSINWSGTHTDYTDSVKGRF |
| | | | TISRNNANNTLYLQMNSLKSEDTAVYYCAKNWGD |
| | | | AGTTWFEKSGSAGQGTQVTVSS |
| < 2F3 | , SEQ ID NO: 1972 | ; PRT; -> | EVQLVESGGSLVQPGGSLRLSCAASGFTFDDYAM |
| | | | TWVRQAPGKGLEWVSSINWSGTHTDYTGSVKGRF |
| | | | TISRNNANNTLYLQMNSLKSDDTAVYYCAKNWGD |
| | | | AGTTWFEKSGSAGPGTQVTVSS |
| < 2F5 | , SEQ ID NO: 1973 | ; PRT; -> | EVQLVESGGSLVPPGGSLRLSCAASGFTFDDYAM |
| | | | SWVRQAPGKGLEWVSSINWSGTHTDYTDSVKGRF |
| | | | TISRNNANNTLYLQMNSLKSEDTAVYYCAKNWGD |
| | | | AGTTWFEKSGSAGQGTQVTVSS |
| < 30E10 | , SEQ ID NO: 1974 | ; PRT; -> | KVQLVESGGSLVPPGGSLRLSCAASGFTFDDYAM |
| | | | TWVRQAPGKGLEWVSSINWSGTHTDYTDSVKGRF |
| | | | TISRNNANNTLYLQMNSLKSEDTAVYYCAKNWGD |
| | | | AGTTWFEKSGSAGQGTQVTVSS |
| < 29H1 | , SEQ ID NO: 1975 | ; PRT; -> | EVQLVESGGSLVPPGGSLRLSCAASGFTFDDYAM |
| | | | SWVRQAPGKGLEWVSSINWSGTHTGYTDSVKGRF |
| | | | TISRNNANNTLYLQMNSLKSEDTAVYYCAKNWGD |
| | | | AGTTWFEKSGSAGQGTQVTVSS |
| < 17E2 | , SEQ ID NO: 1976 | ; PRT; -> | EVQLVESGGSLVPPGGSLRLSCAASGFTFDDYGM |
| | | | SWVRQAPGKGLEWVSSINWSGTHTDYTDSVKGRF |
| | | | TISRNNANNTLYLQMNSLKSEDTAVYYCAKNWGD |
| | | | AGTTWFEKSGSAGQGTQVTVSS |
| < 2B1 | , SEQ ID NO: 1977 | ; PRT; -> | EVQLVESGGSLVQPGGSLRLSCAASGFTFDDYAM |
| | | | TWVRQAPGKGLEWVSSINWSGTHTDYTDSVKGRF |
| | | | TISRNNANNTLYLQMNSLKSDDTAVYYCAKNWGD |
| | | | AGTTWFEKSGSAGPGTQVTVSS |
| < 2A5 | , SEQ ID NO: 1978 | ; PRT; -> | EVQLVESGGGLVQPGGSLRLSCATSGFTFDDYAM |
| | | | TWVRQAPGKGLEWVSSINWSGTHTDYTDSVKGRF |
| | | | TISRNNANNTLYLQMNSLKSEDTAVYYCAKNWGD |
| | | | AGTTWFEKSGSAGQGTQVTVSS |
| < 13C12 | , SEQ ID NO: 1979 | ; PRT; -> | EVQLVESGGSLVQPGGSLRLSCATSGFTFDDYAM |
| | | | TWVRQAPGKGLEWVSSINWSGTHTDYTDSVKGRF |
| | | | TISRNNANNTLYLQMNSLKSEDTAVYYCAKNWGD |
| | | | AGTTWFEKSGSAGQGTQVTVSS |
| < 17E10 | , SEQ ID NO: 1980 | ; PRT; -> | EVQLVESGGSLVQPGGSLRLSCAASGFTFDDYAM |
| | | | TWVRQAPGKGLEWVSSINWSGTHTDCTDSVKGRF |
| | | | TISRNNANNTLYLQMNSLKSEDTAVYYCAKNWGD |
| | | | AGTTWFEKSGSAGQGTQVTVSS |
| < 27D4 | , SEQ ID NO: 1981 | ; PRT; -> | EVQLVESGGSLVQPGGSLRLSCAASGFTFDDYAM |
| | | | TWVRQASGKGLEWVSSINWSGTHTDYADSVKGRF |
| | | | TISRNNANNTLYLQMNSLKSEDTAVYYCAKNWGD |
| | | | AGTTWFEKSGSAGQGTQVTVSS |
| < 15F9 | , SEQ ID NO: 1982 | ; PRT; -> | EVQLVESGGSLVQPGGSLRLSCAASGFTFDDYAM |
| | | | TWVRQAPGKGLEWVSSINWSGTHTDYTGSVKGRF |
| | | | TISRNNANNTLYLQMNSLKSDDTAVYYCAKNWGD |
| | | | AGTTWFEKSGSAGQGTQVTVSS |
| < 30H9 | , SEQ ID NO: 1983 | ; PRT; -> | EVQLVESGGSLVQPGGSLRLSCAASGFTFDDYAM |
| | | | TWVRQAPGKGLEWVSSINWSGTHTDYTDSVKGRF |
| | | | TISRNNANNTLYLQMNSLKSEDTAVYYCAKNWGD |
| | | | AGTTWFEKSGSAGQGTQVTVSS |
| < 39C1 | , SEQ ID NO: 1984 | ; PRT; -> | EVQLVESGGSLVPPGGSLRLSCAASGFTFDDYGM |
| | | | SWVRQAPGKGLEWVSSINWSGTHTDYTDSVKGRF |
| | | | TISRNNANNTLYLQMNSLKSEDTAVYYCAKNWGD |
| | | | AGTTWFEKSGSAGQGTQVTVSS |
| < 27G2 | , SEQ ID NO: 1985 | ; PRT; -> | EVQLVESGGSLVQPGGSLRLSCAASGFTFDDYAM |
| | | | TWVRQTPGKGLEWVSSINWSGTHTDYTDSVKGRF |
| | | | TISRNNANNTLYLQMNSLKSDDTAVYYCAKNWGD |
| | | | AGTTWFEKSGSAGPGTQVTVSS |
| < 2D3 | , SEQ ID NO: 1986 | ; PRT; -> | EVQLVESGGSLVQPGGSLRLSCAASGFTFDDYAM |
| | | | SWVRQVPGKGLEWVSSINWSGTHTDYADSVKGRF |
| | | | TISRNNANNTLYLQMNSLKSEDTAVYYCAKNWRD |
| | | | AGTTWFEKSGSAGQGTQVTVSS |
| < 5F7 | , SEQ ID NO: 1987 | ; PRT; -> | EVQLVESGGGLVQAGGSLRLSCAASGITFSINTM |
| | | | GWYRQAPGKQRELVALISSIGDTYYADSVKGRFT |
| | | | ISRDNAKNTVYLQMNSLKPEDTAVYYCKRFRTAA |
| | | | QGTDYWGQGTQVTVSS |
| < 118N121_A1_4_OK/ | , SEQ ID NO: 1988 | ; PRT; -> | EVQLVESGGGFVQTGGSPRLSCAASGRSFSEYAA |
| 1- | | | AWFRQSPGKERDLVAGIMWDGRSLFYADSVKGRF |
| 127 | | | TISRDNAKNTLHLQMNSLKPEDTAVYYCAYHKTP |
| | | | YTTLELNRPHAFGSWGQGTQVTVSS |
| < 47D5 | , SEQ ID NO: 1989 | ; PRT; -> | KVQLVESGGGLVQPGGSLRLSCAASGSIFGFNDM |
| | | | AWYRQAPGKQRELVALISRVGVTSSADSVKGRFT |
| | | | ISRVNAKDTVYLQMNSLKPEDTAVYYCYMDQRLD |
| | | | GSTLAYWGQGTQVTVSS |
| < 14B11 | , SEQ ID NO: 1990 | ; PRT; -> | EVQLVESGGGLVQAGGSLRLSCAASGSTFSSYGM |
| | | | GWFRQVPGKEREFVATINWSGVTAYADSVKGRFT |
| | | | ISRDNAKKTVYLQMNSLKPEDTARYYCGVETYGS |
| | | | GSSLMTEYDYWGQGTQVTVSS |
| < 14B10 | , SEQ ID NO: 1991 | ; PRT; -> | EVQLVESGGGLVQAGGSLRLSCAVNSRTFSSYGM |
| | | | GWFRQAPGKEREFVATINWSGVTAYADSIKGRFT |
| | | | ISRDNAKETVYLQMNSLKPDDTGVYYCAAETYGS |
| | | | GSSLMSEYDYWGQGTQVTVSS |
| < 14B4 | , SEQ ID NO: 1992 | ; PRT; -> | EVQLVESGGGLVQAGGSLRLSCAVSSRAFSSYGM |
| | | | GWFRQAPGKDREFVATINWSGVTAYADSIKGRFT |
| | | | ISRDNAKETVYLQMNSLKPEDTGVYYCAAETYGS |
| | | | GSSLMSEYDYWGQGTQVTVSS |
| < 14C11 | , SEQ ID NO: 1993 | ; PRT; -> | EVQLVESGGGLVQAGGSLRLSCAVNSRTFSSYGM |
| | | | GWFRQAPGKEREFVATINWSGATAYADSIKGRFT |
| | | | ISRDNAKETVYLQMNSLKPDDTGVYYCAAETYGS |
| | | | GSSLMSEYDYWGQGTQVTVSS |
| < 14B5 | , SEQ ID NO: 1994 | ; PRT; -> | EVQLVESGGGLVQAGGSLRLSCAVSSRAFSSYGM |
| | | | GWFRQAPGKDREFVATINWSGVTAYADSIKGRFT |
| | | | ISRDNAKETVYLQMNSLKPDDTGVYYCAAETFGS |
| | | | GSSLMSEYDYWGQGTQVTVSS |
| < 14C6 | , SEQ ID NO: 1995 | ; PRT; -> | EVQLVESGGGSVQAGGSLRLSCVASEGTFSSYGM |
| | | | GWFRQAPGKERAFVATINWSGVTAYADSVKGRFT |
| | | | ISRDNAKKTVYLQMNSLKPEDTAVYYCATDTYGS |
| | | | GSSLMNEYDYWGQGTQVTVSS |
| < 14A4 | , SEQ ID NO: 1996 | ; PRT; -> | EVQLVESGGGSVQAGSSLTLSCVASEGTFSSYGM |
| | | | GWFRQAPGKERAFVATINWSGVNAYADSVKGRFT |
| | | | ISRDNAKKTAYLQMNSLKPEDTAVYYCAAETYGS |
| | | | GSSLMNEYDYWGQGTQVTVSS |
| < 14B3 | , SEQ ID NO: 1997 | ; PRT; -> | EVQLVESGGGLVQPGGSLTLSCVASEGTFSSYGM |
| | | | GWFRQAPGKERAFVATINWSGVNAYADSVKGRFT |
| | | | ISRDNAKKTAYLQMNSLKPEDTAVYYCAAETYGS |
| | | | GSSLMNEYDYWGQGTQVTVSS |
| < 14C1 | , SEQ ID NO: 1998 | ; PRT; -> | EVQLVESGGGSVQAGGSLRLSCAASGSTFSSYGM |
| | | | GWFRQAPGKERAFVATINWSGVTAYADSVKGRFT |
| | | | ISRDNAKKTVYLQMNSLKPEDTAVYYCATETYGS |
| | | | GSSLMNEYDYWGQGTQVTVSS |
| < 14A12 | , SEQ ID NO: 1999 | ; PRT; -> | EVQLVKSGGGLVQAGGSLRLSCAASERTFSSYGM |
| | | | GWFRQAPGKEREFVATINWSGVTAYADSVKGRFT |
| | | | ISRDNAKKTVYLQMNSLKPEDTAVYYCAAEPYGS |
| | | | GSSLISEYDYWGHGTQVTVSS |
| < 14A2 | , SEQ ID NO: 2000 | ; PRT; -> | EVQLVESGGGLVQAGGSLRLSCAASERTFSSYGM |
| | | | GWFRQAPGKEREFVATINWSGVTAYADSVKGRFT |
| | | | ISRDNAKKTVYLQMNSLKPEDTAVYYCAAEPYGS |
| | | | GSSLISEYDYWGHGTQVTVSS |
| < 14A1 | , SEQ ID NO: 2001 | ; PRT; -> | EVQLVESGGGSVQAGGSLRLSCAASERTFSSYGM |
| | | | GWFRQAPGKEREFVATINWSGVTAYADSVKGRFT |
| | | | ISRDNAKKTVYLQMNSLKPEDTAVYYCAAEPYGS |
| | | | GSSLMSEYDYWGHGTQTVSS |
| < 17C3 | , SEQ ID NO: 2002 | ; PRT; -> | EVQLVESGGGLVQAGGSLRLSCAANGLTFRRYDM |
| | | | GWYRQAPGQQREWVAAISGAGDINYADSVKGRFT |
| | | | MARDNANHTVHLQMNSLKPEDTAVYYCNANWKML |
| | | | LGVENDYWGQGTQVTVSS |
| < 46D3 | , SEQ ID NO: 2003 | ; PRT; -> | KVQLVESGGGLVQAGGSLRLSCAASGRTFTEYSM |
| | | | GWFRQAPGKEREFVATISWNYGYTYYSDSVKGRF |
| | | | TVSRDIAENTVYLQMNTLKSEDTAVYYCAAKIGW |
| | | | LSIRGDEYEYWGQGTQVTVSS |
| < 27H5 | , SEQ ID NO: 2004 | ; PRT; -> | EVQLVESGGGLVQAGGSLRLSCAASGFTFDDYGI |
| | | | GWFRQASGKEREGVSCITSSDGSTYYADSVKGRF |
| | | | TISSDNAKNTVYLQMNSLKPEDTAVYYCAALPFV |
| | | | CPSGSYSDYGDEYDYWGQGTQVTVSS |
| < 17C2 | , SEQ ID NO: 2005 | ; PRT; -> | EVQLVESGGGLVQPGGSLRLSCAASGFAFSSYAM |
| | | | SWVRQAPGKGLEWVSAVDSGGGRTDYAHSVKGRF |
| | | | TISRDNAKNTLYLQMSSLKPEDTALYYCTKHVSD |
| | | | SDYTEYDYWGQGTQVTVSS |
| < 17D11 | , SEQ ID NO: 2006 | ; PRT; -> | EVQLVESGGGLVQAGGSLRLSCTASGRTSSTSAM |
| | | | GWFRQAPGKEREFVATISRGGSATYYADSLKGRF |
| | | | TISRDNAKNTLYLQMNSLKPEDTAVYYCAARRSS |
| | | | LYTSSNVFEYDYWGQGTQVTVSS |
| < 15A6 | , SEQ ID NO: 2007 | ; PRT; -> | EVQLVESGGGLVQAGGSLRLSCVTSRRPASTRTM |
| | | | AWYRQAPGKQRDWVATISSHGLPVYADSVKGRFT |
| | | | VSRDNANNTVYLQMNTLKPEDTAVYYCRDVNADY |
| | | | WGQGTQVTVSS |
| < 17B6 | , SEQ ID NO: 2008 | ; PRT; -> | EVQLVESGGGLVQPGGSLRLSCAASRIPFSTRTM |
| | | | AWYRQAPGKQRDWVATIGTSGPPRYADSVKGRFT |
| | | | VSRDNAKNTVYLQMNSLKAEDTAVYYCWDVNADY |
| | | | WGQGTQVTVSS |
| < 17C5 | , SEQ ID NO: 2009 | ; PRT; -> | EVQLVESGGGLVQAGGSLRLSCVTSRRPASTRTM |
| | | | AWYRQAPGKQRDWVATISSHGLPVYADSVKGRFT |
| | | | VSRDNANNTVYLQMNTLKPEDTAVYYCRDVNADY |
| | | | WGQGTPVTVSS |
| < 15E11 | , SEQ ID NO: 2010 | ; PRT; -> | EVQLVESGGGLVQAGGSLRLSCVASRIPFSSRTM |
| | | | AWYRQAPGKQRDWVATISARGMPAYEDSVKGRFT |
| | | | VSRDNDKNTLYLQMNSLKPEDTAVYYCRDVNADY |
| | | | WGQGTQVTVSS |
| < 15C2 | , SEQ ID NO: 2011 | ; PRT; -> | EVQLVESGGGLVQAGGSLRLSCVTSRRPASTRTM |
| | | | AWYRQAQGKQRDWVATISSHGLPVYADSVKGRFT |
| | | | VSRDNANNTVYLQMNTLKPEDTAVYYCRDVNADY |
| | | | WGQGTQVTVSS |
| < 2A3 | , SEQ ID NO: 2012 | ; PRT; -> | EVQLVESGGGLVQAGGSLNLSCVASGIPFSTRTM |
| | | | AWYRQAPGKPRDWVATIRNGAPVYADSVKGRFTV |
| | | | SRDNAKNTLYLQMNSLKPEDTATYLCRDVNGDIW |
| | | | GQGTQVTVSS |
| < 27A5 | , SEQ ID NO: 2013 | ; PRT; -> | EVQLVESGGGLVQAGGSLNLSCVASGIPFSTRTM |
| | | | AWYRQPPGNERDWVATIRSGAPVYADSVKGRFTV |
| | | | SRDNAKNTLYLQMNSLEPEDTATYYCWDVNGDIW |
| | | | GQGTPVTVSS |
| < 2C5 | , SEQ ID. NO: 2014 | ; PRT; -> | EVQLVESGGGLVQAGGSLNLSCVASGIPFSTRTM |
| | | | AWYRQTPGKSRDWVATIRSGTPVYADSVKGRFTV |
| | | | SRDNAKNTLYLRMNSLKSEDSATYTCRAVNADIW |
| | | | GQGTQVTVSS |
| < 27G5 | , SEQ ID NO: 2015 | ; PRT; -> | EVQLVESGGGLVQPGGSLRLSCVASRIPASIRTM |
| | | | AWYRQTPGNQRDWDATIGSSGTPAYADSVKGRFT |
| | | | VSRDNAKNTVYLQMNSLKPEDTAVYYCRDVNGDY |
| | | | WGQGTQVTVSS |
| < 13A9 | , SEQ ID NO: 2016 | ; PRT; -> | EVQLVESGGGLVQAGGSLRLSCVASRIPASIRTM |
| | | | AWYRQAPGKQRDWVATIGTGGTPAYADSFKGRFT |
| | | | VSRDNANHTVYLQMNSLKPEDTAVYYCRDVNGDY |
| | | | WGQGTQVTVSS |
| < 29E9 | , SEQ ID NO: 2017 | ; PRT; -> | EVQLVESGGGLVQPGGSLRLSCVASRIPASIRTM |
| | | | AWYRQTPGNQRDWLATIGSSGTPAYADSVKGRFT |
| | | | VSRDNAKNTVYLQMNSLKPEDTAVYYCRDVNGDY |
| | | | WGQGTQVTVSS |
| < 15D8 | , SEQ ID NO: 2018 | ; PRT; -> | EVQLVESGGGLVQPGGSLKLSCVASTIPASIRTM |
| | | | AWYRQTPGNQRDWLATIGSSGTPAYADSVKGRFT |
| | | | VSRDNAKNTVYLQMNSLKPEDTAVYYCRDVNGDY |
| | | | WGQGTQVTVSS |
| < 15G4 | , SEQ ID NO: 2019 | ; PRT; -> | EVQLVESGGGLVQAGGSLRLSCVASGIPFRSRTM |
| | | | AWYRQAPGKTRDWVATIGTHGTPLYADSVKGRFT |
| | | | VSRDNAKNTLYLQMNSLKPEDTAVYYCWDVNGDY |
| | | | WGQGTQVTVSS |
| < 15D12 | , SEQ ID NO: 2020 | ; PRT; -> | EVQLVESGGGLVQAGESLRLSCATSGITFKRYVM |
| | | | GWYRQGPGKQRELVATVNDGGTTSYADSVKGRFA |
| | | | ISRDNAKNTAYLQMNSLKAEDTAVYYCNAVWKLP |
| | | | RFVDNDYWGQGTQVTVSS |
| < 15E12 | , SEQ ID NO: 2021 | ; PRT; -> | EVQLMESGGGLVQAGGSLRLSCAANGLTFRRYDM |
| | | | GWYRQAPGQQREWVAAISGAGDINYADSVKGRFT |
| | | | MARDNANHTVHLQMNSLKPEDTAVYYCNANWKML |
| | | | LGVENDYWGQGTQVTVSS |
| < 13D7 | , SEQ ID NO: 2022 | ; PRT; -> | EVQLVESGGGLVQAGGSLRLSCAANGLTFRRYDM |
| | | | GWYRQAPGQQREWVAAISGAGDINYADSVKGRFT |
| | | | MARDNANHTVHLQMNSLKPEDTAVYYCNANWKML |
| | | | LGVENDYWGQGTQVTVSS |
| < 13A8 | , SEQ ID NO: 2023 | ; PRT; -> | EVQLVESGGGLVQPGGSLRLSCAASGLGIAFSRR |
| | | | TMAWYRQAPGKQRDWVATIAGDGSTVYADSMKGR |
| | | | FTISRDNAENTVYLQMNSLKPEDTAVYYCWDVNR |
| | | | DYWGQGTQVTVSS |
| < 15A4 | , SEQ ID NO: 2024 | ; PRT; -> | EVQLVESGGGLVQPGGSLRLSCAASGLGIAFSRR |
| | | | TMAWYRQAPGKQRDWVATIAGDGSTVYADSMKGR |
| | | | FTISRDNAKNTVYLQINSLKPEDTAVYYCWDVNR |
| | | | DYWGQGTQVTVSS |
| < 17F7 | , SEQ ID NO: 2025 | ; PRT; -> | EVQLVESGGGLVQAGGSLRLSCVASGIAQSIRVM |
| | | | AWYRQPPGKQRDWVGTISSDGTANYADSVKGRFT |
| | | | ISRDNAKKTMYLQMNSLKPDDTAVYYCRDVNRDY |
| | | | WGQGTQVTVSS |
| < 15C8 | , SEQ ID NO: 2026 | ; PRT; -> | EVQLVESGGGLVQAGGSLRLSCAASGIAFRIRTM |
| | | | AWYRQAPGKQRDWVATSDSGGTTLYADSVKGRFT |
| | | | VSRDNAENTVYLQMNSLKPEDTAVYYCRDVNRDY |
| | | | WGQGTQVTVSS |
| < 17A10 | , SEQ ID NO: 2027 | ; PRT; -> | EVQLVESGGGLVQAGGSLRLSCVASGIPSIRAIA |
| | | | WYRQAPGKQRDWVATSGTGYGATYDDSVKGRFTL |
| | | | SRDNAKNTVYLQMNSLKPEDTAVYYCRDVNRDYW |
| | | | GQGTQVTVSS |
| < 27D3 | , SEQ ID NO: 2028 | ; PRT; -> | EVQLMESGGGLVQPGGSLRLSCAASGLGIAFSRR |
| | | | TMAWYRQAPGKQRDWVATIAGDGSTVYADSMKGR |
| | | | FTISRDNAENTVYLQMNSLKPEDTAVYYCWDVNR |
| | | | DYWGQGTQVTVSS |
| < 13B12 | , SEQ ID NO: 2029 | ; PRT; -> | EVQLVESGGGLVQAGGSLRLSCAASGIAFRIRTM |
| | | | AWYRQAPGKQRDWVATIGSDGTTIYADSVKGRFT |
| | | | LSRHNAENTVYLQMNSLKPEDTAVYYCRDVNRDY |
| | | | WGQGTQVTVSS |
| < 15B2 | , SEQ ID NO: 2030 | ; PRT; -> | EVQLVESGGGLVQAGGSLRLSCVVSGIPSSIRAM |
| | | | AWYRQAPGRQRDWVATIYSPSGSAVYADSVKGRF |
| | | | TISSDNAKSTIYLQMNSLKPDDTAVYYCRDVNRD |
| | | | YWGQGTQVTVSS |
| < 15B11 | , SEQ ID NO: 2031 | ; PRT; -> | EVQLVESGGGSVQAGGSLRLSCVVSGIPSSIRAM |
| | | | AWYRQAPGRQRDWVATIYSRSGGAVYADSVKGRF |
| | | | TISSDNAKNTIYLQMNSLKPDDTAVYYCRDVNRD |
| | | | YWGQGTQVTVSS |
| < 13C9 | , SEQ ID NO: 2032 | ; PRT; -> | EVQLVESGGGLVQAGGSLRLSCVASGIPSIHAMA |
| | | | WYRQAPGKQRDWGATTYSRGGTTYNDSAKGRFTI |
| | | | SRDNAKKTVYLQMNSLKPEDTAVYYCRDVNRDYW |
| | | | GQGTQVTVSS |
| < 17D5 | , SEQ ID NO: 2033 | ; PRT; -> | EVQLVESGGGLVQPGGSLRLSCAASGIIGTIRTM |
| | | | AWYRQAPGKQRDWVASIGTRGAPVYADSVNGRFT |
| | | | ISRDGATNTVFLQMNNLKPEDTAVYYCRDVNRDY |
| | | | WGQGTQVTVSS |
| < 27B5 | , SEQ ID NO: 2034 | ; PRT; -> | EVQLVESGGGLVQAGGSLRLPCAASGIAFRIRTM |
| | | | AWYRQAPGKQRDWVATSDSGGTTLYADSVKGRFT |
| | | | VSRDNAENTVYLQMNSLKPEDTAVYYCRDVNRDY |
| | | | WGQGTQVTVSS |
| < 27C7 | , SEQ ID NO: 2035 | ; PRT; -> | EVQLVESGGGLVQAGGSLRLSCAASGIAFRIRTM |
| | | | AWYRQAPGKQRDWVATSDSGGTTLYADSVKGRFT |
| | | | VSRDNADNTVYLQMNSLKPEDTAVYYCRDVNRDY |
| | | | WGQGTQVTVSS |
| < 13D4 | , SEQ ID NO: 2036 | ; PRT; -> | EVQLVESGGGLVQAGGSLRLSCVVSGIPSSIRAM |
| | | | AWYRQAPGRQRDWVATIYSPSGSAVYADSVKGRF |
| | | | TISSDNAKSTIYLQMNSLEPDDTAVYYCRDVNRE |
| | | | YWGQGTQVTVSS |
| < 15G5 | , SEQ ID NO: 2037 | ; PRT; -> | EVQLVESGGGLVQAGGSLRLSCVVSGIPSTIRAM |
| | | | AWYRQAPGRQRDWVATIYSPSGSAVYADSVKGRF |
| | | | TISSDNAKKTIYLQMNSLKPDDTAVYYCRDVNRE |
| | | | YWGQGTQVTVSS |
| < 13C4 | , SEQ ID NO: 2038 | ; PRT; -> | EVQLVESGGGLVQAGGSLRLSCVVSGIPSSIRAM |
| | | | AWYRQAPGRQRDWVATIYSPSGSAVYADSVKGRF |
| | | | TISSDNAKSTIYLQMNSLKPDDTAVYYCRDVNRE |
| | | | YWGQGTQVTVSS |
| < 46G1 | , SEQ ID NO: 2039 | ; PRT; -> | EVQLVESGGGLVQAGGSLRLSCAASGRTFSDDAM |
| | | | GWFRQAPGKERECVASLYLNGDYPYYADSVKGRF |
| | | | TISRDNAKNAVILQMNNLKTEDTAVYYCAAKPGW |
| | | | VARDPSQYNYWGQGTQVTVSS |
| < 46E4 | , SEQ ID NO: 2040 | ; PRT; -> | EVQLVESGGGLVQAGGSLRLSCAASGRAFKDDAV |
| | | | GWFRQAPGKERECVASMYLDGDYPYYADSVKGRF |
| | | | TISRDNAKNAVILQMNNLKTEDTAVYYCAAKPGW |
| | | | VARDPSEYNYWGQGTQVTVSS |
| < 17B5 | , SEQ ID NO: 2041 | ; PRT; -> | EVQLVESGGGLVQTGGSLRLSCAASGSTFRTDMM |
| | | | GWYRQAPGKQREFVASITKFGSTNYADSVKGRFT |
| | | | ISNDNAKDTVYLQMNSLKSEDTAVYYCRNFNRDL |
| | | | WGQGTQVTVSS |
| < 15C9 | , SEQ ID NO: 2042 | ; PRT; -> | EVQLVESGGGLVQAGGSLKLSCVNSGIPSTLRAM |
| | | | AWYRQAPGRQRDWVATSSNTGGTTYDDSVKGRFT |
| | | | ISRDNAKNTVYLQMNSLKPEDTGVYYCRDVNRDL |
| | | | WGQGTQVTVSS |
| < 13D10 | , SEQ ID NO: 2043 | ; PRT; -> | EVQLVESGGGLVQPGGSLRLSCAASSVITLDSNA |
| | | | IGWFRQAPGKEREEVSCIASSDGSTYYAESVKGR |
| | | | FTISKDYTRNTVYLQVNSLKPEDTAVYHCATDAN |
| | | | PNCGLNVWNSWGQGTQVTVSS |
| < 17C6 | , SEQ ID NO: 2044 | ; PRT; -> | EVQLVESGGGLVQAGGSLTLSCAASGSTSSLDIM |
| | | | AWYRQAPEKQRELVASVSGGGNSDYASSVKGRFT |
| | | | ISGDTAKSTLYLQMNSLKPEDTAMYYCYGRDYYY |
| | | | MPFWGQGTQVTVSS |
| < 15A2 | , SEQ ID NO: 2045 | ; PRT; -> | EVQLVESGGGLAQAGGSLSLSCAASGRFFSTRVM |
| | | | AWYRQTPGKQREFVASMRGSGSTNYADSARGRFA |
| | | | ISRDNAKNTVYLQMNSLKPEDTAVYYCRDINEDQ |
| | | | WGQGTQVTVSS |
| < 17A8 | , SEQ ID NO: 2046 | ; PRT; -> | EVQLVESGGGLVQAGGSLSLSCAASGRFFSTRVM |
| | | | AWYRQTPGKQREFVASMRGSGSTNYADSVRGRFA |
| | | | ISRDNAKNMVYLQMNTLKPEDTAVYYCRDINEDQ |
| | | | WGQGTQVTVSS |
| < 15G10 | , SEQ ID NO: 2047 | ; PRT; -> | EVQLVESGGGLVQAGGSLSLSCAASGRFFSTRVM |
| | | | AWYRQTPGKQREFVASMRGSGSTNYADSARGRFA |
| | | | ISRDNAKNTVYLQMNSLKPEDTAVYYCRDINEDQ |
| | | | WGQGTQVTVSS |
| < 27A3 | , SEQ ID NO: 2048 | ; PRT; -> | EVQLVESGGGLVQAGGSLSLSCVASGRFFSTRVM |
| | | | AWYRQTPGKQREFVASMRGSGSTNYADSVRGRFA |
| | | | ISRDNAKNTVYLQMNTLKPEDTAVYYCRDINEDQ |
| | | | WGQGTQVTVSS |
| < 17H10 | , SEQ ID NO: 2049 | ; PRT; -> | EVQLVESGGGLVQAGGSLSLSCSASGRFFSTRVM |
| | | | AWYRQTPGNQREFVATIHSSGSTIYADSVRGRFA |
| | | | ISRDNAKNTVYLQMRSLKPEDTAVYYCRDINADQ |
| | | | WGQGTQVTVSS |
| < 30D10 | , SEQ ID NO: 2050 | ; PRT; -> | EVQLVESGGGLVQAGGSLTLSCTASETTVRIRTM |
| | | | AWYRQPPGNQREWVATIGSNGFATYPDSVKGRFT |
| | | | ISRDNAKNTVYLQMNSLKPEDTAVYYCRDINRDI |
| | | | WGQGSQVTVSS |
| < 15H4 | , SEQ ID NO: 2051 | ; PRT; -> | EVQLVESGGGLVQAGGSLTLSCAPSESTVSFNTV |
| | | | AWYRQAPGEQREWVATISRQGMSTYPDSVKGRFT |
| | | | ISRDNAKNTVYLQMNNLKPEDTAVYYCRDINHDI |
| | | | WGRGSQVTVSS |
| < 17B7 | , SEQ ID NO: 2052 | ; PRT; -> | EVQLVESGGGLVQAGGSLRLSCAASGIISSFRTM |
| | | | AWYRQAPGKQRDWVATIGSDGLANYADSVKGRFT |
| | | | ISRDNAKKTVYLQMNSLKPEDTAVYFCRDINRDY |
| | | | WGQGTQVTVSS |
| < 15D2 | , SEQ ID NO: 2053 | ; PRT; -> | EVQLVESGGGLVQAGGSLRLSCVVSGVFGPIRAM |
| | | | AWYRQAPGKQRDWVATIGSSGHPVYTDSVKGRFT |
| | | | FSKDGAKNTVYLQMNSLKPEDTAVYYCRDINRDY |
| | | | WGQGTQVTVSS |
| < 17G5 | , SEQ ID NO: 2054 | ; PRT; -> | EVQLVESGGGLVQPGGSLRLSCAASGIGIAFSSR |
| | | | TMAWYRQAPGKQRDWVATIGSGGTTNYADSVKGR |
| | | | FTISRDNAKNTVYLQMNSLKPEDTAVYYCRDINR |
| | | | DYWGQGTQVTVSS |
| < 15B6 | , SEQ ID NO: 2055 | ; PRT; -> | EVQLVESGGGLVQPGGSLRLSCAASGIIGSFRTM |
| | | | AWYRQAPGNQRDWVATIGSAGLASYADSVRGRFT |
| | | | LSRDNAKKTVYLQMNSLKPEDTAIYYCRDINGDY |
| | | | WGQGTQVTVSS |
| < 27F2 | , SEQ ID NO: 2056 | ; PRT; -> | EVQLVESGGGLVQAGGSLRLSCAASGIISSFRTL |
| | | | AWYRQAPGKQRDWVATISSAGGTAYADAVKGRFT |
| | | | ISISRDNVEYTVDLQMDSLKPEDTAVYYCRDING |
| | | | DYWGQGTQVTVSS |
| < 17F5 | , SEQ ID NO: 2057 | ; PRT; -> | EVQLVESGGGLVQPGGSLRLSCAASGLGIAFSRR |
| | | | TMAWYRQAPGKQRDWVATIAGDGSTVYADSMKGR |
| | | | FTISRDNAKNTVYLQVNSLKPEDTAVYYCWDTNG |
| | | | DYWGQGTQVTVSS |
| < 17B2 | , SEQ ID NO: 2058 | ; PRT; -> | EVQLVESGGGLVQPGGSLRLSCAGSGFTFSNYAM |
| | | | TWVRQAPGKGLEWVSGVGGDGVGSYADSVKGRFT |
| | | | ISRDNAKNTLYLQMNSLKPEDTALYYCTKDISTF |
| | | | GWGPFDYWGQGTQVTVSS |
| < 27H4 | , SEQ ID NO: 2059 | ; PRT; -> | EVQLVESGGGLVQAGGSLRLSCVASKMTFMRYTM |
| | | | GWYRQAPGKQRDLVASIDASGGTNYADSVKGRFT |
| | | | ISRDNAKNTVYLEMNSLKPEDTGVYYCNGRWDIV |
| | | | GAIWWGQGTQVTVSS |
| < 13A4 | , SEQ ID NO: 2060 | ; PRT; -> | EVQLVESGGGLVQAGGSLRLSCVASKMTFMRYTM |
| | | | GWYRQAPGKQRDLVASIDSSGGTNYADSVKGRFT |
| | | | ISRDNAKNTVYLEMNSLKPEDTGVYYCNGRWDIV |
| | | | GAIWWGQGTQVTVSS |
| < 2A1 | , SEQ ID NO: 2061 | ; PRT; -> | EVQLVESGGGLVQAGGSLRLSCVASKITFRRYIM |
| | | | DWYRQAPGKQRELVASINSDGSTGYTDSVKGRFT |
| | | | ISRDNTKNTLDLQMNSLKPEDTAVYYCHGRWLEI |
| | | | GAEYWGQGTQVTVSS |
| < 15E10 | , SEQ ID NO: 2062 | ; PRT; -> | EVQLVESGGGLVQAGGSLKLSCVASGITFFRYTM |
| | | | GWYRQAPGKERELVAEISSADEPSFADAVKGRFT |
| | | | ISRDNAKNTVVLQMNGLKPEDTAVYYCKGSWSYP |
| | | | GLTYWGKGTLVTVSS |
| < 27E7 | , SEQ ID NO: 2063 | ; PRT; -> | EVQLVESGGGLVQAGGSLRLSCAASGITFRRYDM |
| | | | GWYRQFPGKERELVATILSEGDTNYVDPVKGRFT |
| | | | ISRDNAKNTVYLQMNDLKPEDTAVYYCNGVWRAI |
| | | | GRTYWGQGTQVTVSS |
| < 47E5 | , SEQ ID NO: 2064 | ; PRT; -> | EVQLVESGGGLVQAGGSLRLSCAASASIFGFDSM |
| | | | GWYRQAPGNERILVAIISNGGTTSYRDSVKGRFT |
| | | | IARDNAKNTVSLQMNSLKPEDTAVYYCNLDRRSY |
| | | | NGRQYWGQGTQVTVSS |
| < 2G4 | , SEQ ID NO: 2065 | ; PRT; -> | EVQLVESGGGLVQAGGSLRLSCAASGNIFSHNAM |
| | | | GWYRQAPGKQRELVTYITINGIANYVDSVKGRFT |
| | | | ISRDNTKNTMYLQMVSLKPEDTAVYYCNVGGREY |
| | | | SGVYYYREYWGQGTQVTVSS |
| < 14D4 | , SEQ ID NO: 2066 | ; PRT; -> | EVQLVESGGGLVQAGDSLRLSCAASGRALDTYVM |
| | | | GWFRQAPGDGREFVAHIFRSGITSYASSVKGRFT |
| | | | ISRDNAKNTVYLQMASLKPEDTAAYYCAARPSDT |
| | | | TWSESSASWGQGTQVTVSS |
| < 17A5 | , SEQ ID NO: 2067 | ; PRT; -> | EVQLVESGGGLVQPGGSLRLSCAASGFTEDDYSM |
| | | | SWVRQATGKGLEWVSGISWNGGSTNYADSVKGRF |
| | | | TISRDNVKNTLYLQMNSLKSEDTAVYYCAKDLGN |
| | | | SGRGPYTNWGQGTQVTVSS |
| < 15D10 | , SEQ ID NO: 2068 | ; PRT; -> | EVQLVESGGGLVQPGGSLKLSCAASGFTFSSYRM |
| | | | YWVRQAPGKGLEWVSAIKPDGSITYYADSVKGRF |
| | | | TISRDNAKNTVYLQMNSLKPEDTAVYYCATDCGV |
| | | | PGFGWTFSSWGQGTQVTVSS |
| < 13C2 | , SEQ ID NO: 2069 | ; PRT; -> | EVQLVESGGGLVQAGGSLRLSCAASGSTFSINRM |
| | | | AWYRQSPGKQRELVAAVDNDDNTEYSDSVAGRFT |
| | | | ISRDNAKNAVHLQMNSLRLEDTAVYYCNAKQLPY |
| | | | LQNFWGQGTQVTVSS |
| < 17G11 | , SEQ ID NO: 2070 | ; PRT; -> | EVQLVESGGGLVQAGGSLRLSCAASGSTFSINRW |
| | | | GWYRQAPGKQRELVAAIDDGGNTEYSDFVNGRFT |
| | | | ISRDNPETAVHLQMNSLKLEDTAVYYCNAKQLPY |
| | | | LQNFWGQGTQVTVSS |
| < 17A3 | , SEQ ID NO: 2071 | ; PRT; -> | EVQLVESGGGLVQAGGSLSLSCAASATLHRFDNN |
| | | | WYRQAPGKQRELVATIAHDGSTNYANSVKGRFTI |
| | | | SRDNARDTLFLQMHALQPEDTAVYMCNLHRWGLN |
| | | | YWGQGTQVTVSS |
| < 27B7 | , SEQ ID NO: 2072 | ; PRT; -> | EVQLVESGGGLVQPGGSLRLSCAASGFTFSSYAM |
| | | | SWVRQAPGKGLEWVSAISSGGGSITTYADSVKGR |
| | | | FTISRDNAKNTLYLQMSSLKPEDTALYYCAKARS |
| | | | SSSYYDFGSWGQGTQVTVSS |
| < 17A6 | , SEQ ID NO: 2073 | ; PRT; -> | EVQLVESGGGLVQPGGSLRLSCAASGFTFSSYAM |
| | | | SWVRQAPGKGLEWVSAISSGGGSITTYADSVKGR |
| | | | FTISTDNAKNTLYLQMSSLKPEDTALYYCAKARS |
| | | | SSSYYDFGSWGQGTQVTVSS |
| < 17D7 | , SEQ ID NO: 2074 | ; PRT; -> | EVQLVESGGGLVQPGGSLRLSCAASGFTLDYCAI |
| | | | GWFRQAPGKEREGVSCISSSDGSTYYADSVKGRF |
| | | | TISRDNAKNTVYLQMNSLKPEDTAVYYCATDRGS |
| | | | GTCYADFGSWGQGTQVTVSS |
| < 46D4 | , SEQ ID NO: 2075 | ; PRT; -> | EVQLVESGGGLVQPGGSLRLSCAASGFIFDDYAM |
| | | | SWVRQAPGKGLEWVSSINWSGTHTDYAEDMKGRF |
| | | | TISRDNAKKTLYLQMNSLQSEDTAVYYCAKGWGP |
| | | | AVTSIPVATLGTQVTVSS |
| < 27B3 | , SEQ ID NO: 2076 | ; PRT; -> | EVQLVESGGGLVQAGGSLTLSCTASETTVRIRTM |
| | | | AWYRQPPGNQREWVATIGSNGFATYPDSVKGRFT |
| | | | ISRDNAKNTVYLQMNSLKPEDTAVYYCRDINRDI |
| | | | WGQGSQVTVSS |
| < 27E5 | , SEQ ID NO: 2077 | ; PRT; -> | EVQLVESGGGLVQAGGSLTLSCTASETTVRIRTM |
| | | | AWYRQPPGNQREWVATIGSNGFATYPDSVKGRFT |
| | | | ISRDNAKNTVYLQMNSLKPEDTAVYYCRDINRDI |
| | | | WGQGSQVTVSS |
| < 27D6 | , SEQ ID NO: 2078 | ; PRT; -> | EVQLVESGGGLVQAGGSLTLSCTASETTVRIRTM |
| | | | AWYRQRPGNQREWVATIGSNGFATYPDSVKGRFT |
| | | | ISRDNAKNTVYLQMNSLKPEDTAVYYCRDINRDI |
| | | | WGQGSQVTVSS |
| < 30D10 | , SEQ ID NO: 2079 | ; PRT; -> | EVQLVESGGGLVQAGGSLTLSCTASETTVRIRTM |
| | | | AWYRQPPGNQREWVATIGSNGFATYPDSVKGRFT |
| | | | ISRDNAKNTVYLQMNSLKPEDTAVYYCRDINRDI |
| | | | WGQGSQVTVSS |
| < 47G11 | , SEQ ID NO: 2080 | ; PRT; -> | EVQLVESGGGLVQPGGSLRLSCAASGRIFYPMGW |
| | | | FRQAPGKEREFVAAIGSGDIITYYADSVKGRFTI |
| | | | SRDNAKNTVYLQMNSLKPEDTAVYYCASSRDYSR |
| | | | SRDPTSYDRWGQGTQVTVSS |
| < 27C3 | , SEQ ID NO: 2081 | ; PRT; -> | EVQLVESGGGLVQPGGSLRLSCAASGFTFDDYAT |
| | | | SWVRQAPGKGPEWVSAINSGGGSTYYADSVKGRF |
| | | | TISRDNAKNTLYLQMNSLKPEDTAVYYCARPRGS |
| | | | SLYLLEYDYWGQGTQVTVSS |

TABLE B-2
Preferred Nanobodies against HER2 obtained as described in Example 4

| | | ; PRT | |
|---|---|---|---|
| < Name | , SEQ ID NO: # | (protein) | Amino acid sequence |
| < 11A101/1- | , SEQ ID NO: 2082 | ; PRT; -> | EVQLVESGGGLVQAGGSLRLSCAASGRTFNAMGW |
| 120 | | | FRQAPGKEREFVAAISRSPGVTYYADSVKGRFTT |
| | | | SRDNAKNTVYLQMNDLKPEDTAVYYCAADFYLAT |
| | | | LAHEYDYWGQGTQVTVSS |
| < 11A22/1- | , SEQ ID NO: 2083 | ; PRT; -> | EVQLVESGGGLVQAGGSLRLSCAASGRTFSSYAM |
| 122 | | | AWFRQAPGTEREFIAGIRWSDGSTYYADSVKGRF |
| | | | TISRDNAKNTVYLQMNSLKPEDTAVYYCAADFYV |
| | | | STLAHEYDYWGQGTQVTVSS |
| < 12D44/1- | , SEQ ID NO: 2084 | ; PRT; -> | KVQLVESGGGLVQAGGSLRLSCAASGRTFSSYAM |
| 122 | | | AWFRQAPGTEREFIAGIRWSDGSTYYADSVKGRF |
| | | | TISRANAKNTVYLQMNGLKPEDTAVYYCAADFYV |
| | | | STLAHEYDYWGQGTQVTVSS |
| < 12E11/1- | , SEQ ID NO: 2085 | ; PRT; -> | EVQLVESGGGLVQAGGSLRLSCAASGRTFSSYAM |
| 122 | | | AWFRQAPGKEREFVGGIRWSDGSTYYADSVKGRF |
| | | | TISRDNAKITVYLQMNSLKPEDTAVYYCAADFYV |
| | | | STLAHEYDYWGQGTQVTVSS |
| < 13G111/1- | , SEQ ID NO: 2086 | ; PRT; -> | EVQLVESGGGLVQAGGSLRLSCAASGRTFSSYAM |
| 123 | | | GWFRQAPGKERAFVAAIRWSGGNTYYADSVKGRF |
| | | | TISRDNAKNTVYLQMNSLKPEDTAVYYCAADTFT |
| | | | LSTLSHEYDYWGQGTQVTVSS |
| < 13E71/1- | , SEQ ID NO: 2087 | ; PRT; -> | EVQLVESGGGLVQAGGSLRLSCVASGRTFSNYAL |
| 123 | | | AWFRQAPGKEREFVAAINWRSGGSTYYADSVKGR |
| | | | FTISRDNAKNTVYLQMNSLKPEDTAVYYCAADLI |
| | | | VATLPGEYDYWGQGTQVTVSS |
| < 14H61/1- | , SEQ ID NO: 2088 | ; PRT; -> | EVQLVESGGGLVQAGGSLRLSCAASGRTFSRFAM |
| 122 | | | GWFRQAPGKEREFVAAVRWSDDYTYYADSVKGRF |
| | | | TISRDNAKNTVYLQMNSLSPEDTAVYYCAADEIL |
| | | | ATLPHEYDYWGQGTQVTVSS |
| < 22B12/1- | , SEQ ID NO: 2089 | ; PRT; -> | EVQLVESGGGLVQAGGSLRLSCAASGRTFSSYAM |
| 124 | | | AWFRQAPGKEREFVAGINKSGGITHSADSVKGRF |
| | | | TISRDNAKNTVYLQMNSLKPEDTAVYYCAADAYT |
| | | | VIATLPHEYDYWGQGTQVTVSS |
| < 14H71/1- | , SEQ ID NO: 2090 | ; PRT; -> | EVQLVESGGGLVQAGGSLRLSCEASGLTISSLTM |
| 123 | | | AWFRQAPGKEREFVANIKWSGDRIVYADSVKGRF |
| | | | TISRDSAKNAVNLQMELVESDDTAVYYCAAKHST |
| | | | VAGLTHEYDYWGQGTQVTVSS |
| < 12D51/1- | , SEQ ID NO: 2091 | ; PRT; -> | EVQLVESGGGLVQPGGSLRLSCAASGSAFSIKSM |
| 120 | | | GWYRQAPGKQRELAAVIISSGTTTYADSVKGRFT |
| | | | ISRDSAKNTVYLQMDSLKPEDTAVYVCNAVYVST |
| | | | WGNGYDYWGQGTQVTVSS |
| < 11A111/1- | , SEQ ID NO: 2092 | ; PRT; -> | EVQLVESGGGLVQAGGSLGLSCAAAGRTFSSSLM |
| 126 | | | GWFRQAPGKEREFVAAITDNGGSTYYADSVKGRF |
| | | | TISRDNAKNSVYLQMNSLKPEDTAIYYCAARRSG |
| | | | YYSLSTSPHQYAYWGQGTQVTVSS |
| < 13G71/1- | , SEQ ID NO: 2093 | ; PRT; -> | EVQLVESGGGLVQAGGSLRLSCAASGRAFSSYAM |
| 124 | | | GWFRQAPGKERDFVAAITSSGSTNYADSVKGRFT |
| | | | ISRDNAKNTVYLQMNSLKPEDTAVYYCGARVNYA |
| | | | AYSRLEHDYHYWGQGTQTVSS |
| < 13G74/1- | , SEQ ID NO: 2094 | ; PRT; -> | EVQLVESGGGLVQAGGSLRLSCATSGRTFSTYAS |
| 125 | | | MGWFRQTPGKEREFVAAITSSGSTNYADSVKGRF |
| | | | TISRDNAKNTVYLQMNSLKPEDTAVYYCGARVNY |
| | | | AAYSRLEHDYHYWGQGTQVTVSS |
| < 11A71A/1- | , SEQ ID NO: 2095 | ; PRT; -> | EVQLVESGGGLVQPGGSLRLSCAASGNIDGIITM |
| 116 | | | GWYRQRPGKPREWVGTINSGGDTNYAGSVKGRFT |
| | | | IARDDAKNTMYLQMNGMKPEDTAVYYCKMNRAGI |
| | | | YEYWGQGTQVTVSS |
| < 22B101/1- | , SEQ ID NO: 2096 | ; PRT; -> | EVQLVESGGGLVQTGGSLRLSCAASGPTFSDYAI |
| 123 | | | GWFRQAPGKEREFVAAISSSGISTIYGDSVKGRF |
| | | | DISRDNAKNTVYLQMNRLKPEDTAVYYCAARLFM |
| | | | ATPNQGQYYYWGQGTQVTVSS |
| < 11B42/1- | , SEQ ID NO: 2097 | ; PRT; -> | EVQLVESGGGLVQAGDSLRLSCAASGFTFSNHIM |
| 123 | | | GWFRQAPGKERELIAHITWNGGSTYYADSVKGRF |
| | | | AISRDNALNTVYLQMNSLKPEDTAVYYCAARPSY |
| | | | STNNVKSYRYWGQGTQVTVSS |
| < 13E111/1- | , SEQ ID NO: 2098 | ; PRT; -> | EVQLVESGGGLVQAGSSLRLSCALSGRTFSDYAI |
| 124 | | | GWFRQAPGKEREFVAAISGWSGGTTNYADSVKGR |
| | | | FTISRDNGKNTVDLRMNSLKPEDTAVYYCAARPA |
| | | | VVHTRKESYPYWGQGTQVTVSS |
| < 14H12/1- | , SEQ ID NO: 2099 | ; PRT; -> | EVQLVESGGGLVQAGGSLRLSCIASERTFSSAGV |
| 125 | | | GWFRQAPGKERDFVAAISWNGVTIYYADSVKGRF |
| | | | TISRDNAKNTVYLQMNSLKPEDTAVYYCAARINY |
| | | | SVLTTTSSSYHYWGQGTQVTVSS |
| < 13G101/1- | , SEQ ID NO: 2100 | ; PRT; -> | EVQLVESGGGLVQPGDSLRLSCSASEGTLSRSRV |
| 123 | | | AWFRQAPGKEREFVTVISGVGTSYADSVKGRFTI |
| | | | SRDDAKNTVYLQMNSLKAEDTAIYYCAADFRSTW |
| | | | LSSSGSSYTYWGQGTQVTVSS |
| < 13G41/1- | , SEQ ID NO: 2101 | ; PRT; -> | EVQLVESGGGLVQPGGSLTLSCVGSGRRFSADVM |
| 121 | | | GWYRQAPGKQREFVASISSGSAINYADSVKGRFT |
| | | | VSRDNAQNTVYLQMNSLKIEDTGVYYCNARRIVN |
| | | | VEGAYRDYWGQGTQVTVSS |
| < 22B910/1- | , SEQ ID NO: 2102 | ; PRT; -> | EVQLVESGGGLVQPGGSLPLSCAASGSIFRMNDM |
| 121 | | | GWYRQAPGKQRERVATLTSAGNTNYADSVKGRFT |
| | | | ISGDDARNTVYLQMNSLNPEDTAVYYCNAKVVVA |
| | | | VEGAKYDYWGQGTQVTVSS |
| < 21A81/1- | , SEQ ID NO: 2103 | ; PRT; -> | EVQLVESGGGLAQAGGSLRLSCAVFGRSRYGMAW |
| 122 | | | FRRAPGKEREFVAGIAWNGASIGSADSVRGRFTI |
| | | | SRDNSENTVYFEMGSLKPEDTAVYYCAICRISWC |
| | | | AGAESDYGYWGQGTQVTVSS |
| < 21A92/1- | , SEQ ID NO: 2104 | ; PRT; -> | EVQLVESGGGQVQAGGSLRLSCTESGRAFNTRAM |
| 127 | | | GWFRQAPEKEREFVAGITMSGFNTRYADSVKGRF |
| | | | TISRDNAKGTVYLQMSSLKPEDTAVYYCAADSIT |
| | | | DRRSVAVAHTSYYYWGQGTQVTVSS |
| < 22C712/1- | , SEQ ID NO: 2105 | ; PRT; -> | EVQLVESGGGLVQAGGSLGLSCAASGRTFSNYAM |
| 123 | | | GWFRQAPGKEREFVAGISWSGGHTFYADSVKGRF |
| | | | TISRDNTKNTVYLQMNSMRPEDTAVYYCAARLSS |
| | | | VAVASTRYDYWGQGTQVTVSS |
| < 11A13/1- | , SEQ ID NO: 2106 | ; PRT; -> | EVQLVESGGGLVQAGDSLRLSCVASGGTFGSYAM |
| 125 | | | GWFRQAPGKEREFVATIDWSGDTAFYADSVKGRF |
| | | | TISRDIANDVVYLQMNSLEPEDTAVYYCARNRQS |
| | | | GVASENLRLYTYWGQGTQVTVSS |
| < 13G93/1- | , SEQ ID NO: 2107 | ; PRT; -> | EVQLVESGGGLAQAGDSLRLSCVDSGSSFSAYAM |
| 123 | | | GWFRQAPGKEREFVAAVSWDGRNTYYADSVKGRF |
| | | | TISRDNAKNTLYLQTTSLRPEDTGVYYCAEDKQS |
| | | | GVSVNPKYAYWGQGTQVTVSS |
| < 12C52/1- | , SEQ ID NO: 2108 | ; PRT; -> | EVQLVESGGGLVQAGGSLRLSCAVSGGTFESDTM |
| 118 | | | AWFRQAPGKEREFVARVSWIRTTYYSDSVKGRFT |
| | | | ISKDNAKNTVYLQMNSLKPEDTAVYYCAAQTLGR |
| | | | SLYDYWGQGTQVTVSS |
| < 12C61/1- | , SEQ ID NO: 2109 | ; PRT; -> | EVQLVESGGGLVQAGGSLRLSCAASGRTFSSNAM |
| 126 | | | AWFRQAPGNERELVSAIGWSGASTYYIDSVEGRF |
| | | | TISRDNAKNTVYLQMNSLKPEDTAVYYCAASRYS |
| | | | GGVATARRSEYHYWGQGTQVTVSS |
| < 21A61/1- | , SEQ ID NO: 2110 | ; PRT; -> | EVQLVESGGGLVQAGDSLRLSCVASGDSFNTYTM |
| 125 | | | GWFRQAPGKERFEVAAIRWSGGTTFYGDSVKGRF |
| | | | TISRDYAKNTWYLQMNTLKPEDTAAYYCAAVATY |
| | | | SRNVGSVRNYDYWGQGTQVTVSS |
| < 11A121/1- | , SEQ ID NO: 2111 | ; PRT; -> | EVQLVESGGGLVQAGGSLRLSCVVSEGTFSSYSM |
| 126 | | | GWFRQAPGKDREFVSAITWNGTRTYYRDSVKGRF |
| | | | TISRDNAKNTVQLQMNSLKPEDTAVYYCAVSQPL |
| | | | NYYTYYDARRYDYWGQGTQVTVSS |
| < 11A91/1- | , SEQ ID NO: 2112 | ; PRT; -> | EAQLVESGGGLVQAGGSLRLSCTASGRTYSTTMG |
| 124 | | | WFRQAPGKEREFVAAIRWSGGSAFYADSVKGRFT |
| | | | ISRDNAKNTVYLQMTSLMPEDTAVYYCADTPVYY |
| | | | QRYYDQNAYDYWGQGTQVTVSS |
| < 13G72/1- | , SEQ ID NO: 2113 | ; PRT; -> | EVQLVESGGGLVQAGGSLRLSCAASGRAFSSYAM |
| 118 | | | GWFRQAPGKERDFVAAITSSGSTNYADSVKGRFT |
| | | | ISRDNAKNTVYLQMNSLKPEDTAVYYCAAKYYSY |
| | | | YAYDYWGQGTQVTVSS |
| < 13E81/1- | , SEQ ID NO: 2114 | ; PRT; -> | EVQLVESGGGLVQAGGSLRLSCAASGGTFSVYHM |
| 124 | | | AWFRQAPGKEREFVAAIRSSGGLFYALSVSGRFT |
| | | | ISRDNAKDTMYLQMNVLKPEDTAVYYCAASPVYY |
| | | | IDYSSQYKYGYWGQGTQVTVSS |
| < 11B31/1- | , SEQ ID NO: 2115 | ; PRT; -> | EVQLVESGGGLVQAGGSLRLSCAASGGAFGVYHM |
| 124 | | | GWFRQAPGKEREFVAAIRSGGTTLYEDSVKGRFT |
| | | | ISRDNAKNTVYLRMNSLKPEDTAVYYCATQIYYR |
| | | | TNYYSQNAYDYWGQGTQVTVSS |
| < 13G81/1- | , SEQ ID NO: 2116 | ; PRT; -> | EVQLVESGGGLVQAGGSLRLSCAASGGTFGVYHM |
| 124 | | | GWFRQAPGKEREFVAVIRSGGTTLYADSVKGRFT |
| | | | ISRDDAKNTVYLQMNSLKPEDTAVYLCAAQIYYR |
| | | | TNYYSQNNYDYWGQGTQVTVSS |
| < 21A53/1- | , SEQ ID NO: 2117 | ; PRT; -> | EVQLVESGGGLVQAGGSLELSCAASGGAFGVYHM |
| 124 | | | GWFRQAPGKEREFVAAIRSGGTTLYEDSVKGRVT |
| | | | ISRDDAKNTVYLRMNSLKPEDTAVYYCAAQIYYR |
| | | | TNYYSQNVYDYWGQGTQVTVSS |
| < 14H51/1- | , SEQ ID NO: 2118 | ; PRT; -> | EVQLVESGGGLVQAGGSLRLSCAASGGTFGVYTM |
| 124 | | | AWFRQAPGKEREFVAAIRSGATTLYEDSVKGRFT |
| | | | ISRDDAKNTVYLRMNSLKPEDTAVYYCAAQIYYR |
| | | | TNYYSQNEYDYWGQGTQVTVSS |
| < 21A21/1- | , SEQ ID NO: 2119 | ; PRT; -> | EVQLVESGGGLVQAGGSLRLSCAASGGTFGVYHM |
| 124 | | | GWFRQAPGTEREFVAVIRSGGTTLYEDSVKGRFT |
| | | | ISRDNAKNTVYLRMNSLKPEDTAVYYCAAQIYYR |
| | | | TNYSSQSNYDYWGQGTQVTVSS |
| < 21A111/1- | , SEQ ID NO: 2120 | ; PRT; -> | EVQLVESGGGLVQAGGSLKLSCAVSGRTIVPYTM |
| 124 | | | AWFRQAPGKEREFVAVTRSGGTTFYADSAKGRFT |
| | | | IARDDAKNTVYLQMNSLKPEDTAVYYCALATAYR |
| | | | TNYSSRDKYDYWGQGTQVTVSS |
| < 22B1212/1- | , SEQ ID NO: 2121 | ; PRT; -> | EVQLVESGGGLVQPGGSLRLSCAASGFTFSSYAM |
| 122 | | | SWVRQAPGKGLEWVSAINSGGGSTSYADSVKGRF |
| | | | TISRDNAKNTLYLQMNSLKPEDTAVYYCAKYLSF |
| | | | YSDYEVYDYWGQGTQVTVSS |
| < 11A31/1- | , SEQ ID NO: 2122 | ; PRT; -> | EVQLVESGGGLVQAGGSLRLSCAASGGTFSSGVM |
| 120 | | | AWFRQSPGEEREFLALITRNGETKKTADSVKGRF |
| | | | TISRDNAKNGVSLQMDSLKAEDTAVYYCASDPTY |
| | | | GSGRWTYWGQGTQVTVSS |
| < 13E51/1- | , SEQ ID NO: 2123 | ; PRT; -> | EVQLVESGGGLVQAGGSLRLSCAASRHTFSGYAM |
| 128 | | | GWFRQAPGKEREFVAAIRWSGGITYYADSVKGRF |
| | | | TISSDNAKNTVYLQMNSLKPEDTALYYCARSVTY |
| | | | YSGSHAYTQEGGYARWGQGTQVTVSS |
| < 12D121/1- | , SEQ ID NO: 2124 | ; PRT; -> | EVQLVESGGGLVQTGGSLRLSCAASGRAFSTYGM |
| 126 | | | GWFRQAPGKAREFVAAISRSGTGTYYAGSMKGRF |
| | | | TISRDDAKNTVYLQMNSLKPEDTAVYYCAARQPY |
| | | | ASGSHYSSTQYTYWGQGTQVTVSS |
| < 13F121/1- | , SEQ ID NO: 2125 | ; PRT; -> | EVQLVESGGGLVQAGGSLRLSCAASGRSFNDYTM |
| 119 | | | GWFRQTPGKEREFVARVWWNGGSAYYADSVKGRF |
| | | | TISIDNAKNTVYLQMNNLTPEDTAVYYCAALYRG |
| | | | RSVYDDWGQGTQVTVSS |
| < 13G121/1- | , SEQ ID NO: 2126 | ; PRT; -> | EVQLVESGGGLVRAGTSLRLSCADSARTFSSAAM |
| 127 | | | GWFRQAPGKEREFVSAISPIGSSKYYADSVKGRF |
| | | | TISRDNAKNTVYLQMDSLKPEDTAVYYCAASSYG |
| | | | STYYSQGRAYYYDYWGQGTQVTVSS |
| < 22B41/1- | , SEQ ID NO: 2127 | ; PRT; -> | EVQLVESGGGLVQPGGSLRLSCTVFGRTFSGDVI |
| 124 | | | GWFRQAPGKEREFVAAISTSGGGTDSADSVKGRF |
| | | | TISKENAKNTVYLQMTILKPEDTAVYYCASSPYG |
| | | | PLYRSTHYYDYWGQGTQVTVSS |
| < 12D71/1- | , SEQ ID NO: 2128 | ; PRT; -> | EVQLVESGGGLVQAGGSLGLSCAASGRTVSTMGW |
| 125 | | | FRQAPGKEREFVTAITWSGDSTNFADSVKGRFTI |
| | | | SRDSAKDTVYLQMNNLKPEDTAVYYCAATTYYSG |
| | | | SYISTLSTSYNYWGQGTQVTVSS |
| < 13F42/1- | , SEQ ID NO: 2129 | ; PRT; -> | EVQLVESGGGLVQAGGSLRLSCVASGRTLSTTGV |
| 111 | | | GWFRQAPGKGRESVATIFVGGTTYYSDSVKGRFT |
| | | | ISRDNAKNAVNLQMSNLKPEDTALHYCTIGSYRG |
| | | | QGTQVTVSS |
| < 12C101/1- | , SEQ ID NO: 2130 | ; PRT; -> | EVQLVESGGGLVQAGGSLRLSCVASGRTLSTTGV |
| 111 | | | GWFRQAPGKERESVATIFVGGTTYYSDSVKGRFT |
| | | | ISRDNARNAVNPQMNNLKPEDTAVYYCTIGSYRG |
| | | | QGTQVTVSS |
| < 14H91/1- | , SEQ ID NO: 2131 | ; PRT; -> | EVQLVESGGGLVQAGGSLRLSCAASGRTFSRDVM |
| 127 | | | GWFRQAPGKEREFVAAKTWSGASTYYADSVRGRF |
| | | | TISRDNAKNAVYLQMNSLKPEDTAVYYCAARDSS |
| | | | TLDSTYYVGGSYNYWGRGTQVTVSS |
| < 13F41/1- | , SEQ ID NO: 2132 | ; PRT; -> | EVQLVESGGGLVQAGGSLRLSCVASGRTLSTTGV |
| 111 | | | GWFRQAPGKERESVATIFVGGTTYYSDSVKGRFT |
| | | | ISRDNAKNAVNLQMSNLKPEDTALYYCTIGSYRG |
| | | | QGTQVTVSS |
| < 14H21/1- | , SEQ ID NO: 2133 | ; PRT; -> | EVQLVESGGGLVQAGGSLRLSCVRSGGYFGSYHI |
| 125 | | | GWFRQAPGNEREFVAAITWNGASTSYADSVKGRF |
| | | | TISRSIAENTVYLQMNKVKPEDTAVYYCAARMYG |
| | | | SDWLPRPEDFDSWGQGTQVTVSS |
| < 22B610/1- | , SEQ ID NO: 2134 | ; PRT; -> | EVQLVESGGGLVQPGGSLRLSCAASGSIFSINAM |
| 120 | | | GWYRPAPGKQRELVARITSTGSTNYADSVKGRFT |
| | | | ISRDNAKNTVYLQMNSLKPEDTAVYYCNADVSPS |
| | | | YGSRWYGWGQGTQVTVSS |
| < 12C32/1- | , SEQ ID NO: 2135 | ; PRT; -> | EMQLVESGGGLVQAGGSLRLSCATSERTFSTYTM |
| 127 | | | AWFRQAPGKEREFVVAIKSSDNSTSYRDSVKGRF |
| | | | TISRDNAKSTMYLQMNSLKPEDTAVYYCAARREY |
| | | | STIYTARYPGEYVYWGQGTQVTVSS |
| < 12D61/1- | , SEQ ID NO: 2136 | ; PRT; -> | EVQLVESGGGLVQPGGSLRLSCAASRSIFSPNVV |
| 116 | | | GWYRQAPGKQRELVAAVTSGGITNYADSVKGRFT |
| | | | ISRDNAKNTLYLQMNSLKAEDTAVYYCNARERGI |
| | | | YDSWGQGTQVTVSS |
| < 13G31/1- | , SEQ ID NO: 2137 | ; PRT; -> | EVQLVESGGGLVQAGGSLRLSCAASGGTFSRYKM |
| 125 | | | GWFRQAPGKEREFVAASRWSGGIKYHADSVKGRF |
| | | | TISRDDAKNSIYLQMNTLKPEDTAVYYCAADDYL |
| | | | GGDNWYLGPYDSWGQGTQVTVSS |
| < 22C65/1- | , SEQ ID NO: 2138 | ; PRT; -> | EVQLVESGGGLVQAGGSLRLSCAVSGFLFDSYAM |
| 124 | | | GWFRQAPGKEREFVAAIRWSGSATDYSDSVKGRF |
| | | | TISRDNAKNTVYLQMNSLIPEDTAVYYCAARKTY |
| | | | RSLTYYGEYDSWGQGTQVTVSS |
| < 11A71/1- | , SEQ ID NO: 2139 | ; PRT; -> | EVQLVESGGGLVQPGGSLRLSCAASRSIRSVSVM |
| 125 | | | GWYRLAPGNQRELVATITADGITNYADSVKGRFT |
| | | | VSRDNGRNTVYLQMNSLKPEDTAVYYCNVDRLLY |
| | | | YSSGYYQTSVDVWGQGTQVTVSS |
| < 11B91/1- | , SEQ ID NO: 2140 | ; PRT; -> | EVQLVESGGALVQPGGSLRLSCAASGSIRSINTM |
| 125 | | | GWYRQAPGNQREFVAAVTEGGTTSYAASVKGRFT |
| | | | ISRDKAKNTVLLQMDSLKPEDTAVYYCNADRFLY |
| | | | YSAGRYDTGSDIWGQGTQVTVSS |
| < 11A81/1- | , SEQ ID NO: 2141 | ; PRT; -> | EVQLVESGGALVQPGGSLRLSCAASDSIRSINIM |
| 125 | | | GWYRQAPGKQREFVAAVTEDGSINYAESVKGRFT |
| | | | ISRDKAKNALYLQMNSLKPEDMAVYYCNADRVLY |
| | | | YSDSRYYTGSNYWGQGTQVTVSS |
| < 11B121/1- | , SEQ ID NO: 2142 | ; PRT; -> | EVQLVESGGGLVQPGGSLRLSCAASGSSASINTM |
| 127 | | | GWYRQAPGEQRELVAEITEGGIINYTDSVKGRFT |
| | | | ISRDNAKNTVYLEMNNLKPEDTAVYYCNADRALY |
| | | | RNYSDGRYYTGYDYWGQGTQVTVSS |
| < 12D31/1- | , SEQ ID NO: 2143 | ; PRT; -> | EVQLVESGGGEVQPGGSLRLSCAASRNIFDFNDM |
| 115 | | | GWYRQGPGKEREFVALINVGGVAKYEDSVKGRFT |
| | | | ISRDNAENTVYLQMNNLKPEDMAVYYCNARILSR |
| | | | NYWGQGNQVTVSS |
| < 11B51/1- | , SEQ ID NO: 2144 | ; PRT; -> | EVQLVESGGGLVQAGGSLRLSCAASGGTFSGRGM |
| 127 | | | GWFRQAPGKEREFVAAVSWSGGNTYYADSVKGRF |
| | | | TISRDNAKSTVYLQMDSLKPEDTAVYYCAASRRF |
| | | | YSGLYYYTDDAYEYWGQGTQVTVSS |
| < 13G51/1- | , SEQ ID NO: 2145 | ; PRT; -> | EVQLVESGGGLVQAGGSLSLSCAASGGTFNGRAV |
| 127 | | | GWFPQAPGEEREFVTGISWSGGSTDYADSVKGRF |
| | | | TISRDNSKNTVSLQMNSLKPEDTAVYYCAASRRF |
| | | | YSGLVYYSVDAYENWGQGTQVTVSS |
| < 13F82A/1- | , SEQ ID NO: 2146 | ; PRT; -> | EVQLVESGGGLVQAGGSLRLSCAISGRTLSGRAM |
| 130 | | | GWFRQAPGKEREFREFVAATSWSGGSKYVADSVT |
| | | | GRFTIFRDNAENTAYLQMNSLNPEDTAVYYCAVT |
| | | | KRYYSIKYYSTVEDYEYWGQGTQVTVSS |
| < 13E101/1- | , SEQ ID NO: 2147 | ; PRT; -> | EVQLVESGGGLVQAGGSLRLSCAVSGRTFNNDHM |
| 128 | | | GWFRQAPGTERELVAATGRRGGPTYYADSVKGRF |
| | | | TISRDNAESTVYLQMNSLKAEDTAVYYCAANRYY |
| | | | CSTYGCLSTPRQYDYWGQGTQVTVSS |
| < 22B85/1- | , SEQ ID NO: 2148 | ; PRT; -> | EVQLVESGGGLVRPGGSLRLSCATSGSDIGINAM |
| 120 | | | GWYRQAPGNQRELVATITGSTGTTYADSVKGRFA |
| | | | ISRDGAKNTVYLQMDSLKPEDTAVYYCNLRVYTG |
| | | | TYGGRNYWGQGTQVTVSS |
| < 11B12/1- | , SEQ ID NO: 2149 | ; PRT; -> | EVQLVESGGGLVQAGGSLRLSCAASGRALINYAM |
| 118 | | | GWFRQAPGKEREFVSAINWSGSHTDYGDSVKGRF |
| | | | AISRDNAKNTVYLQMHSLKPEDTAVYHCATGYSL |
| | | | PAFDSWGPGTQVTVSS |
| < 13G61/1- | , SEQ ID NO: 2150 | ; PRT; -> | EVQLVESGGGVVQAGGSLRLSCAPSGRTFSSYVM |
| 118 | | | GWVRQAPGKAREFVAGITRNSGRTRYADSVKGRF |
| | | | TISRDNADNTVTLQMNSLKPEDTAVYYCAGGIDL |
| | | | YTFHYFGQGTQVTVSS |
| < 14H41/1- | , SEQ ID NO: 2151 | ; PRT; -> | EVQLVESGGGLVQAGGSLRLSCAPSGRTFSSYVM |
| 118 | | | GWVRQAPGKAREFVAGITRNSIRTRYADSVKGRF |
| | | | TISRDNADNTVTLQMNSLKPEDTAVYYCAGGIDL |
| | | | YTFDYFGQGTQVTVSS |
| < 11B81/1- | , SEQ ID NO: 2152 | ; PRT; -> | EVQLVESGGGLVQAGGSLRLSCAASGRPVNNYIM |
| 126 | | | GWFRQALGQGREFVAAINRNGATAAYADSVKGRF |
| | | | TISRDNAEDLLYLQMNLLKPEDTAVYYCAANSDS |
| | | | GFDSYSVWAAYEYWGQGTQVTVSS |
| < 11C11/1- | , SEQ ID NO: 2153 | ; PRT; -> | EVQLVESGGGLVQAGGSLRLSCAASGRTFSAYAM |
| 121 | | | GWFRQAPGKERESVATIRWTGGSSSTSYADSVKG |
| | | | RFTISKNTAENTVYLQMNSLKPEDTAVYYCAVLL |
| | | | TVWDTYKYWGQGTQVTVSS |
| < 12D92/1- | , SEQ ID NO: 2154 | ; PRT; -> | EVQLVESGGGLVQAGGSLRLSCAASGRTYNMAWF |
| 123 | | | RQAPGKEREFVAAMNWSGGSTKYAESVKGRFTIS |
| | | | RANDNNPLYLQMNTLKPEDTAVYYCAATNRWYTG |
| | | | VYDLPSRYEYWGQGTQVTVSS |
| < 13E61/1- | , SEQ ID NO: 2155 | ; PRT; -> | EVQLVESGGGLVQAGGSLRLSCTASGQTFNMGWF |
| 123 | | | RQAPGKEREFVAAISWSQYNTKYADSVKGRFTIS |
| | | | RDNAINSLYLQMDTLKPEDTAVYYCAATNRWFSA |
| | | | VYDLPSRYTYWGQGTQVTVSS |
| < 22B71/1- | , SEQ ID NO: 2156 | ; PRT; -> | EVQLVESGGAFVQPGGSLRLSCAASGSDVWFNVM |
| 114 | | | GWYRQGPGQQLELVASITYGGNINYGDPVKGRFS |
| | | | ISRDNALKTVYLQMNSLKPEDTAVYYCYADLPSR |
| | | | LWGQGTQVTVSS |
| < 21A121/1- | , SEQ ID NO: 2157 | ; PRT; -> | EVQLVESGGGLVQAGGSLRLSCTASGRAFNMGWF |
| 123 | | | RQAPGKEREFVAGVNWGGGSTKVADSVKERFTIS |
| | | | RDYDNSPVYLQMNTLKPEDTAVYYGAATSRWYSA |
| | | | VYDLPTRYDYWGQGTQVTVSS |
| < 13F101/1- | , SEQ ID NO: 2158 | ; PRT; -> | EVQLVESGGGLVQAGGSLRLSCQLSGGTVSDLHM |
| 124 | | | GWFRQAPGKEREFVGFTRWPSITYIAEHVKGRFT |
| | | | ISRDNAKNTVYLQMNSLEREDTAVYYCAADRSYS |
| | | | IDYRHPDSYSYWGQGTQVTVSS |
| < 11A43/1- | , SEQ ID NO: 2159 | ; PRT; -> | EVQLVESGGGLVQAGGSLRLSCAASGSIFRVNHM |
| 123 | | | GWYRQAPGKQREFVAAITSDHITWYADAVKGRFT |
| | | | ISRDNAKNTVTLQMNSLRPEDTAVYYCAADPLLF |
| | | | YGVGSADVDYWGQGTQVTVSS |
| < 12C81/1- | , SEQ ID NO: 2160 | ; PRT; -> | EVQLVESGGGLVQPGGSLRLSCAGSGNIVRDNTM |
| 117 | | | AWYRQAPGNQRDLVATINVGGGTYYAGPVKGRFT |
| | | | ISRDNAKNSVYLQMNSLKPEDTSVYYCNVISGLV |
| | | | QRDYWGQGTQVTVSS |
| < 11B21/1- | , SEQ ID NO: 2161 | ; PRT; -> | EVQLVESGGGLVQAGGSLRLSCAASGRTFSMYLM |
| 124 | | | GWFRQAPGKEREFVSTINRRGGNTYYADSVKGRF |
| | | | TISRDNARNTVYLQMNSLKPEDTAVYYCAAGGHL |
| | | | LGYDVQWEPDYWGQGTQVTVSS |
| < 11B71/1- | , SEQ ID NO: 2162 | ; PRT; -> | EVQLVESGGGLVQAGGSLRLSCAASGRTFERYAM |
| 126 | | | GWFRQAPGKEREFVATISWSGGRDTVYADSVKGR |
| | | | FTISRDNAKNTVYLQMNSLKPEDTAVYYCAAHKR |
| | | | TYELGAHSTDFGSWGQGTQVTVSS |
| < 12C121/1- | , SEQ ID NO: 2163 | ; PRT; -> | EVQLVESGGDLVQPGESLRLSCAVSGVTVDYSGI |
| 126 | | | GWFRQAPEKEREAVSCIESGDGTTTYVDSVKGRF |
| | | | TISRDNAKNAVYLQMNSLKPEDTGVYYCATAVFV |
| | | | DSGDFSVCRGVGYWGKGTQVTVSS |
| < 22C51/1- | , SEQ ID NO: 2164 | ; PRT; -> | EVQLVESGGGLVQAGASLRLSCAASGRTFSRYDI |
| 121 | | | GWFRQAPGKGREFVAAINWSGGTTSFGDSVKGRF |
| | | | TISRDNAKNTVYLQMNSLKPEDTAVYYCAALRSW |
| | | | PRGVDSGSWGQGTQVTVSS |
| < 12D11/1- | , SEQ ID NO: 2165 | ; PRT; -> | EVQLVESGGGLVQTGGSLRLSCAASGRTFSGSRM |
| 123 | | | GWFRQAPGKEREFVAAIRWSGGITWYAESVKSRF |
| | | | TISRDNTKNTIDLQINSLKPEDTAVYYCAADVIY |
| | | | KNIGSGSFDYWGQGTQVTVSS |
| < 12D14/1- | , SEQ ID NO: 2166 | ; PRT; -> | EVQLVESGGGLVQAGGSLRLSCAASGRTFSGSRM |
| 123 | | | GWLRQAPGKEREFVAAVRWSGGITWYAESVKGRF |
| | | | TISRDNTKNTIDLQINSLKPEDTAVYYCAADVIY |
| | | | KNIGSGSFDYWGQGTQVTVSS |
| < 12C111/1- | , SEQ ID NO: 2167 | ; PRT; -> | EVQLVESGGGLVQAGGSLRLSCAVSGLTFSSYAM |
| 123 | | | GWFRQAPGKVREFVATISRSGGRTSYADSVKGRF |
| | | | IVSRDNAKNTADLQMNDLKPEDTAVYYCGASKWY |
| | | | GGFGDTDIEYWGQGTQVTVSS |
| < 22B55/1- | , SEQ ID NO: 2168 | ; PRT; -> | EVQLVESGGGLVQAGGSLRLSCAVSGLTFSTYAM |
| 123 | | | GWFRQAPGKVREFVATISRSGGRTSYADSVKGRF |
| | | | IVSRDNAKNTADLQMNELKPEDTAVYYCGASKWY |
| | | | GGFGDTDIEYWGQGTQVTSS |
| < 14H121/1- | , SEQ ID NO: 2169 | ; PRT; -> | EVQLVESGGGLVQPGGSLRLSCAASGITFRFKAM |
| 113 | | | GWFRQGPGKRRELVARIAGGSTNYADSVKGRFTI |
| | | | SRDDAKNTVFLQMNSLKPEDTAVYYCNVDGPFGN |
| | | | WGQGTQVTVSS |
| < 12C71/1- | , SEQ ID NO: 2170 | ; PRT; -> | EVQLVESGGGLVQAGGSLRLSCTASGGTFGSYAL |
| 125 | | | GWFRQSPGKERESVAAIDWDGSRTQYADSVKGRF |
| | | | TISRENVKDTMYLQMNSLQAEDTGVYYCVRSRHS |
| | | | GNTLSFSLKYDYWGQGTQVTVSS |
| < 21A31/1- | , SEQ ID NO: 2171 | ; PRT; -> | EVQLVESGGGLVQAGGSLRLSCAASEPTFSSVAM |
| 125 | | | GWFRQGPGKEREFAATITWSGDSTYVTDSVKGRF |
| | | | TISRDNARNTAYLQMDSLRPEDTAVYSCAARRWS |
| | | | GTLSLFDNEYYYWGQGTQVTVSS |
| < 12C91/1- | , SEQ ID NO: 2172 | ; PRT; -> | EVQLVESGGGLVQAGGSLRLSCVASGRTSSYYHM |
| 121 | | | AWFRQAPGKEREFIAAINLSSGSTYYPDSVKGRF |
| | | | TISRGNAKNTVNLQMNSLKPEDTAVYYCAADNYR |
| | | | DSYLEYDYWGQGTQVTVSS |
| < 14H81/1- | , SEQ ID NO: 2173 | ; PRT; -> | EVQLVESGGGLVQAGGSLSLSCAASGRTFSNYRM |
| 125 | | | AWFRQAPRKEREFVAAISRSGESTYFADSMKGRF |
| | | | TISRDNTESTGYLQMNNLKPEDTAVYYCAASWDH |
| | | | GDYVDGGFFYDYWGQGTQVTVSS |
| < 12C42/1- | , SEQ ID NO: 2174 | ; PRT; -> | EVQLVESGGGLVQAGGSLRLSCAASGRTFSRYAM |
| 124 | | | HWFRQAPGSERDFVAGISWDGGSTFYANSVKGRF |
| | | | TISRDNAKNMVYLQMNSLKPEDTAVYYCAAAGSA |
| | | | GPPSIDRQYDYWGQGTQVTVSS |
| < 12D102/1- | , SEQ ID NO: 2175 | ; PRT; -> | EVQLVESGGGLVQPGGSLRLSCAASGSSLSFNAM |
| 118 | | | GWSREAPGKRRELVARIISDDSTLYADSVKGRFT |
| | | | ISRDYAKNTAYLQMNSLKPEDTAVYYCVADVRDS |
| | | | IWRSYWGQGTQVTVSS |
| < 11A52/1- | , SEQ ID NO: 2176 | ; PRT; -> | EVQLVESGGGLVQAGGSLRLSCAASGRALSNYAM |
| 120 | | | RWFRQAPGKEREFVATINWSGSHTDYRDSVKGRF |
| | | | TISRDNAENTVYLQMNSLTPEDTAVYYCASGWGA |
| | | | TQAQSGFWGQGTQVTVSS |
| < 14H111/1- | , SEQ ID NO: 2177 | ; PRT; -> | EVQLVESGGGLVQAGGSLRLSCAASGRALISFAM |
| 120 | | | RWFRQAPGKEREFVAAINWSGTHTDYADSVKGRF |
| | | | TISRDNAENTVYLLMNSLIPEDTAVYYCATGWGA |
| | | | TQAQHGFWGQGTQVTVSS |
| < 11B61/1- | , SEQ ID NO: 2178 | ; PRT; -> | EVQLVESGGGLVQAGGSLRLSCAASGRTSSGYGM |
| 120 | | | GWFRQAPGKEREFVAAVGWYGSTYFADSVKGRFT |
| | | | IYRDNAQNTMYLQMNSLKPEDTAVYYCAASSSLA |
| | | | TISQPSSWGQGTQVTVSS |
| < 12E42/1- | , SEQ ID NO: 2179 | ; PRT; -> | EVQLVESGGGLVQPGGSLRLSCAHSGRAFSLRTM |
| 118 | | | GWYRQAPGNQRELVALISAGDSTYYPDSVKGRFT |
| | | | VSRDNAKNTVYLQMNSLKPEDTAVYYCNAKAVTS |
| | | | RDHEYWGQGTQVTVSS |
| < 13F81A/1- | , SEQ ID NO: 2180 | ; PRT; -> | EVQLVESGGGLVQAGGSLRLSCAASGRTFSRYAM |
| 128 | | | GWFRQAPGKEREFVAAISWTGGSSYYGDSVKGRS |
| | | | TISRENAENTVYLQMNSLKPEDTAVYYCAANSDE |
| | | | FYSGTLKLQSRMVEYWGQGTQVTVSS |
| < 11B102/1- | , SEQ ID NO: 2181 | ; PRT; -> | EVQLVESGGGLVQAGGSLRLSCAASGGIFSSHAI |
| 118 | | | SWFRQAFGKAREFVAAINWSGSHRDYADSAKGRF |
| | | | TISRDNAKKTAYLQMNSLRPEDTAVYYCVGGWKT |
| | | | DEYVKWGQGTQVTVSS |
| < 21A41/1- | , SEQ ID NO: 2182 | ; PRT; -> | EVQLVESGGGLVQAGGSLRLSCAASGRIFSNYAW |
| 120 | | | SWFRQAPGKERGFVAAINWSGGYTDYADSVKGRF |
| | | | TISRDNTKNTVYLQMNSLKPEDTAVYYCRPGWVT |
| | | | PSYEYGNWGQGTQVTVSS |
| < 14H101/1- | , SEQ ID NO: 2183 | ; PRT; -> | EVQLVESGGGLVQAGGSLRLSCAASGRTFISSPM |
| 128 | | | GWFRQAPGKEREVVAATTRSGGLPYYSDSVKGRF |
| | | | TISRDNAKNTVDLQMSSLKPEDTAAYYCAADQKY |
| | | | GMSYSRLWLVSEYEYWGQGTQVTVSS |
| < 12E21/1- | , SEQ ID NO: 2184 | ; PRT; -> | EVQLVESGGGLVQPGGSLRLSCAASGSIDSIHVV |
| 115 | | | GWYRKAPGKQREVVAYIGTAGATHYADSVKGRFT |
| | | | ISRDNAENLVYLQMNNLKPEDTAVYYCSAGWGDS |
| | | | AYWGQGTQVTVSS |
| < 13F21/1- | , SEQ ID NO: 2185 | ; PRT; -> | EVQLVESGGGLVQSGGSLRLSCVASGTIVSINAT |
| 123 | | | SWYRQAPGNQRELVATIIGDGRTHYADSVKDRFT |
| | | | ISRDAAANLVYLQMNSLKPSDTAIYSCNANGIES |
| | | | YGWGNRHFNYWTVGTQVTVSS |
| < 12E33/1- | , SEQ ID NO: 2186 | ; PRT; -> | EVQLVESGGGMVQAGGSLRLSCAASGLTLSNYGM |
| 119 | | | GWFRQAPGKEREFVSSINWSGTHTYDADFVKGRF |
| | | | IISRDNAKNTVYLQINSLKPEDTAVYYCAAGGWG |
| | | | TGRYNYWGQGTQVTVSS |
| < 13G11/1- | , SEQ ID NO: 2187 | ; PRT; -> | EVQLVESGGGLVQAGGSLRLSCAASGRTFISNYA |
| 122 | | | MGWFRQAPGKEREFVATINWSGSHSDYADSVKGR |
| | | | FTISRDNAKNTVYLQMNNLKSEDTAVYYCAPGWG |
| | | | TAPLSTSVYWGQGTQVTVSS |

TABLE B-3
Nanobodies against HER2 obtained as described in Example 4

| | | ; PRT | |
|---|---|---|---|
| < Name | , SEQ ID NO: # | (protein) | Amino acid sequence |
| < 118N121_A1_4_OK/ | , SEQ ID NO: 1988 | ; PRT; -> | EVQLVESGGGFVQTGGSPRLSCAASGRSFSEYAA |
| 1- | | | AWFRQSPGKERDLVAGIMWDGRSLFYADSVKGRF |
| 127 | | | TISRDNAKNTLHLQMNSLKPEDTAVYYCAYHKTP |
| | | | YTTLELNRPHAFGSWGQGTQVTVSS |
| < 118N121_A6_2_OK/ | , SEQ ID NO: 2188 | ; PRT; -> | EVQLVESGGGLVQAGGSLRLSCVASGRTFSGYSV |
| 1- | | | GWFRQSPGKEREFVGGINWSGRTYYVDSVKGRFT |
| 123 | | | FSRDNAKNTVYLQMNSLKPEDTAIYLCAVDRFNT |
| | | | IANLPGEYDYWGQGTQVTVSS |
| < 118N121_B8_1_OK/ | , SEQ ID NO: 2189 | ; PRT; -> | EVQLVESGGGLVQDGGSLRLSCAASGQLANFASY |
| 1- | | | AMGWFRQAPGKAREFVAAIRGSGGSTYIADPARS |
| 135 | | | TYYADFVKGRFTISRDNAKNTVYLQMNSLKPEDT |
| | | | AVYYCACETFNSISNLPGEYDYWGQGTQVTVSS |
| < 118N121_A2_2_OK/ | , SEQ ID NO: 2190 | ; PRT; -> | KVQLVESGGGLVQAGGSLRLSCAASGRTFSNYSV |
| 1- | | | GWFRQAPGKEREFVAALSKDGARTYYAASVKGRF |
| 124 | | | TIYRDNAKNVVYLQMSVLNGEDTAVYYCAADHFT |
| | | | FMSNLPSEYDYWGQGTQVTVSS |
| < 118N121_A8_2_OK/ | , SEQ ID NO: 2191 | ; PRT; -> | EVQLVESGGGLVQAGGSLTLSCVISGLTLESHAM |
| 1- | | | GWFRQAPGEEREFVATIRWSGSATFYSDSVKGRF |
| 124 | | | TISRDNAKNTVYLQMNSLKPEDTAVYYCAARKIY |
| | | | RSLSYYGDYDSWGQGTQVTVSS |
| < 118N121_B3_1_OK/ | , SEQ ID NO: 2192 | ; PRT; -> | EVQLVESGGGLVQPGGSLRLSCAASGRTFSDLAL |
| 1- | | | GWFRRAPGKEREHVAAISSSGVTTIYADSVRGRF |
| 123 | | | TISRDEAKNTVYLEMNSLKTDDTAVYYCAARLTM |
| | | | ATPNQSQYYYWGQGTQVTVSS |
| < 118N121_A5_2_OK/ | , SEQ ID NO: 2193 | ; PRT; -> | EVQLVESGGGSVQPGGSLRLSCVASGSISSVNAM |
| 1- | | | GWHRQVSGKERELVAIVTDGFTNYADFAKGRFTI |
| 114 | | | SRDNAKTTVYLQMNSLQPEDTARYYCRYSGIGTD |
| | | | NWGQGIEVTVSS |
| < 118N121_A9_2_OK/ | , SEQ ID NO: 2194 | ; PRT; -> | EVQLVESGGGSVQPGGSLRLSCVASGSISSVNAM |
| 1- | | | GWHRQVPGKQRELVAIVTDGFTNYADFAKGRFTI |
| 114 | | | SRDNAKTTVYLQMNSLQPEDTARYYCRYSGIGTD |
| | | | NWGQGIEVTVSS |
| < 118N121_A7_1_OK/ | , SEQ ID NO: 2195 | ; PRT; -> | EVQLVESGGGLVQPGGSLRLSCAASGNIKSIDVM |
| 1- | | | GWHRQAPGKERELVSDISFGGNTNYANSVKGRFT |
| 122 | | | ISRDNAKNTVYLQMNSLKPEDTAVYYCYADILYK |
| | | | TDIYYRNDFWGQGTQVTVSS |
| < 118N121_A10_1_OK/ | , SEQ ID NO: 2196 | ; PRT; -> | EVQLVESGGGLVQAGGSLRLSCAASGFSFADYAI |
| 1- | | | GWFRQAPGKEREGVSCIANSEGTKYYADSAQGRL |
| 131 | | | PISSDNAKKTVYLQMDSLKPEDTAVYYCAALPYT |
| | | | ICPVVVKKGAVYYGVDDYWGKGTQVTVSS |
| < 118N121_A11_1_OK/ | , SEQ ID NO: 2197 | ; PRT; -> | EVQLVESGGGLVQPGGSLRLSCAASGFPFGMYGM |
| 1- | | | RWVRQAPGKGPERVSSINSDGDTTYYADSVKGRF |
| 120 | | | TISRDNDENMLYLQMNSLKPEDTAVYYCATGFSD |
| | | | RSFAVTHKGQGTQVTVSS |
| < 118N121_B7_4_OK/ | , SEQ ID NO: 2198 | ; PRT; -> | EVQLVESGGGLEQAGGSLRLSCAASGLTFRSAAM |
| 1- | | | GWFRQGPGKEREFVAAISRDGAATYYTDSVKGRF |
| 124 | | | TISRDNAKNTVFLQMNSLKPEDTAIYYCAADFRL |
| | | | ARLRVADDYDYWGQGTQVTVSS |
| < 118N121_B2_1_OK/ | , SEQ ID NO: 2199 | ; PRT; -> | EVQLVESGGGLVQAGGSLRLSCAASGFSLDDRAI |
| 1- | | | AWFRQAPGKAREGVSCITPHHGGIIFTRESVKGR |
| 130 | | | FATSSDSAKNTVYLQMHSLKPEDTAVYYCATLRT |
| | | | DYSINWANCQRDSLYGYWGQGTQVTVSS |
| < 118N121_B7_1_OK/ | , SEQ ID NO: 2200 | ; PRT; -> | EMQLVESGGGLVQPGGSLRLSCAASGNIPPINAM |
| 1- | | | AWYRQAPGNERELVAAVTSGGGTNYATSVKGRFI |
| 119 | | | ISRDDSKNTVDLQMNSLKPEDTAVYYCNLGGWTR |
| | | | THPFDYWGQGTQVTVSS |

TABLE B-4
Bivalent Nanobodies against HER2 as described in Example 12

| | | ; PRT | |
|---|---|---|---|
| < Name | , SEQ ID NO: # | (protein) | Amino acid sequence |
| < 2A4-9GS-2A4 | , SEQ ID NO: 2201 | ; PRT; -> | EVQLVESGGGLVQPGGSLRLSCAASGFIFDDY |
| | | | AMSWVRQAPGKGLEWVSAINWSGSHRNYADSV |
| | | | KGRFTISRDNAKKTVYLQMNSLQSEDTAVYYC |
| | | | GTGWQSTTKNQGYWGQGTQVTVSSGGGGSGGG |
| | | | SEVQLVESGGGLVQPGGSLRLSCAASGFIFDD |
| | | | YAMSWVRQAPGKGLEWVSAINWSGSHRNYADS |
| | | | VKGRFTISRDNAKKTVYLQMNSLQSEDTAVYY |
| | | | CGTGWQSTTKNQGYWGQGTQVTVSS |
| < 2A5-9GS-2A5 | , SEQ ID NO: 2202 | ; PRT; -> | EVQLVESGGGLVQPGGSLRLSCATSGFTFDDY |
| | | | AMTWVRQAPGKGLEWVSSINWSGTHTDYTDSV |
| | | | KGRFTISRNNANNTLYLQMNSLKSEDTAVYYC |
| | | | AKNWGDAGTTWFEKSGSAGQGTQVTVSSGGGG |
| | | | SGGGSEVQLVESGGGLVQPGGSLRLSCATSGF |
| | | | TFDDYAMTWVRQAPGKGLEWVSSINWSGTHTD |
| | | | YTDSVKGRFTISRNNANNTLYLQMNSLKSEDT |
| | | | AVYYCAKNWGDAGTTWFEKSGSAGQGTQVTVSS |
| < 2C3-9GS-2C3 | , SEQ ID NO: 2203 | ; PRT; -> | EVQLVESGGGLVQPGGSLRLSCVASGFSLDDY |
| | | | GMTWVRQAPGKGLEWVSSINWSGTHTDYADSV |
| | | | KGRFTISRDNAKNTLFLQMNSLRSEDTAVYYC |
| | | | NQGWKIVPTDRTGHGTQVTVSSGGGGSGGGSE |
| | | | VQLVESGGGLVQPGGSLRLSCVASGFSLDDYG |
| | | | MTWVRQAPGKGLEWVSSINWSGTHTDYADSVK |
| | | | GRFTISRDNAKNTLFLQMNSLRSEDTAVYYCN |
| | | | QGWKIVPTDRTGHGTQVTVSS |
| < 2D3-9GS-2D3 | , SEQ ID NO: 2204 | ; PRT; -> | EVQLVESGGSLVQPGGSLRLSCAASGFTFDDY |
| | | | AMSWVRQVPGKGLEWVSSINWSGTHTDYADSV |
| | | | KGRFTISRNNANNTLYLQMNSLKSEDTAVYYC |
| | | | AKNWRDAGTTWFEKSGSAGQGTQVTVSSGGGG |
| | | | SGGGSEVQLVESGGSLVQPGGSLRLSCAASGF |
| | | | TFDDYAMSWVRQVPGKGLEWVSSINWSGTHTD |
| | | | YADSVKGRFTISRNNANNTLYLQMNSLKSEDT |
| | | | AVYYCAKNWRDAGTTWFEKSGSAGQGTQVTVSS |
| < 5F7-9GS-5F7 | , SEQ ID NO: 2205 | ; PRT; -> | EVQLVESGGGLVQAGGSLRLSCAASGITFSIN |
| | | | TMGWYRQAPGKQRELVALISSIGDTYYADSVK |
| | | | GRFTISRDNAKNTVYLQMNSLKPEDTAVYYCK |
| | | | RFRTAAQGTDYWGQGTQVTVSSGGGGSGGGSE |
| | | | VQLVESGGGLVQAGGSLRLSCAASGITFSINT |
| | | | MGWYRQAPGKQRELVALISSIGDTYYADSVKG |
| | | | RFTISRDNAKNTVYLQMNSLKPEDTAVYYCKR |
| | | | FRTAAQGTDYWGQGTQVTVSS |

TABLE B-5
Bispecific Nanobodies against HER2 and against serum albumin as
described in Example 12

| | | ; PRT | |
|---|---|---|---|
| < Name | , SEQ ID NO: # | (protein) | Amino acid sequence |
| < 2C3-9GS- | , SEQ ID NO: 2206 | ; PRT; -> | EVQLVESGGGLVQPGGSLRLSCVASGFSLDDY |
| ALB1 | | | GMTWVRQAPGKGLEWVSSINWSGTHTDYADSV |
| | | | KGRFTISRDNAKNTLFLQMNSLRSEDTAVYYC |
| | | | NQGWKIVPTDRTGHGTQVTVSSGGGGSGGGSE |
| | | | VQLVESGGGLVQPGNSLRLSCAASGFTFRSFG |
| | | | MSWVRQAPGKEPEWVSSISGSGSDTLYADSVK |
| | | | GRFTISRDNAKTTLYLQMNSLKPEDTAVYYCT |
| | | | IGGSLSRSSQGTQVTVSS |
| < 2A4-9GS- | , SEQ ID NO: 2207 | ; PRT; -> | EVQLVESGGGLVQPGGSLRLSCAASGFIFDDY |
| ALB1 | | | AMSWVRQAPGKGLEWVSAINWSGSHRNYADSV |
| | | | KGRFTISRDNAKKTVYLQMNSLQSEDTAVYYC |
| | | | GTGWQSTTKNQGYWGQGTQVTVSSGGGGSGGG |
| | | | SEVQLVESGGGLVQPGNSLRLSCAASGFTFRS |
| | | | FGMSWVRQAPGKEPEWVSSISGSGSDTLYADS |
| | | | VKGRFTISRDNAKTTLYLQMNSLKPEDTAVYY |
| | | | CTIGGSLSRSSQGTQVTVSS |
| < 2A5-9GS- | , SEQ ID NO: 2208 | ; PRT; -> | EVQLVESGGGLVQPGGSLRLSCATSGFTFDDY |
| ALB1 | | | AMTWVRQAPGKGLEWVSSINWSGTHTDYTDSV |
| | | | KGRFTISRNNANNTLYLQMNSLKSEDTAVYYC |
| | | | AKNWGDAGTTWFEKSGSAGQGTQVTVSSGGGG |
| | | | SGGGSEVQLVESGGGLVQPGNSLRLSCAASGF |
| | | | TFRSFGMSWVRQAPGKEPEWVSSISGSGSDTL |
| | | | YADSVKGRFTISRDNAKTTLYLQMNSLKPEDT |
| | | | AVYYCTIGGSLSRSSQGTQVTVSS |
| < 2D3-9GS- | , SEQ ID NO: 2209 | ; PRT; -> | EVQLVESGGSLVQPGGSLRLSCAASGFTFDDY |
| ALB1 | | | AMSWVRQVPGKGLEWVSSINWSGTHTDYADSV |
| | | | KGRFTISRNNANNTLYLQMNSLKSEDTAVYYC |
| | | | AKNWRDAGTTWFEKSGSAGQGTQVTVSSGGGG |
| | | | SGGGSEVQLVESGGGLVQPGNSLRLSCAASGF |
| | | | TFRSFGMSWVRQAPGKEPEWVSSISGSGSDTL |
| | | | YADSVKGRFTISRDNAKTTLYLQMNSLKPEDT |
| | | | AVYYCTIGGSLSRSSQGTQVTVSS |
| < 5F7-9GS- | , SEQ ID NO: 2210 | ; PRT; -> | EVQLVESGGGLVQAGGSLRLSCAASGITFSIN |
| ALB1 | | | TMGWYRQAPGKQRELVALISSIGDTYYADSVK |
| | | | GRFTISRDNAKNTVYLQMNSLKPEDTAVYYCK |
| | | | RFRTAAQGTDYWGQGTQVTVSSGGGGSGGGSE |
| | | | VQLVESGGGLVQPGNSLRLSCAASGFTFRSFG |
| | | | MSWVRQAPGKEPEWVSSISGSGSDTLYADSVK |
| | | | GRFTISRDNAKTTLYLQMNSLKPEDTAVYYCT |
| | | | IGGSLSRSSQGTQVTVSS |

TABLE B-6
Biparatopic Nanobodies against HER2

| | | ; PRT | |
|---|---|---|---|
| < Name | , SEQ ID NO: # | (protein) | Amino acid sequence |
| < 27B3-35GS- | , SEQ ID NO: 2211 | ; PRT; -> | EVQLVESGGGLVQAGGSLTLSCTASETTVRIR |
| 2D3 | | | TMAWYRQPPGNQREWVATIGSNGFATYPDSVK |
| | | | GRFTISRDNAKNTVYLQMNSLKPEDTAVYYCR |
| | | | DINRDIWGQGSQVTVSSGGGGSGGGGSGGGGS |
| | | | GGGGSGGGGSGGGGSGGGGSEVQLVESGGSLV |
| | | | QPGGSLRLSCAASGFTFDDYAMSWVRQVPGKG |
| | | | LEWVSSINWSGTHTDYADSVKGRFTISRNNAN |
| | | | NTLYLQMNSLKSEDTAVYYCAKNWRDAGTTWF |
| | | | EKSGSAGQGTQVTVSS |
| < 27C3-35GS- | , SEQ ID NO: 2212 | ; PRT; -> | EVQLVESGGGLVQPGGSLRLSCAASGFTFDDY |
| 2D3 | | | ATSWVRQAPGKGPEWVSAINSGGGSTYYADSV |
| | | | KGRFTISRDNAKNTLYLQMNSLKPEDTAVYYC |
| | | | ARPRGSSLYLLEYDYWGQGTQVTVSSGGGGSG |
| | | | GGGSGGGGSGGGGSGGGGSGGGGSGGGGSEVQ |
| | | | LVESGGSLVQPGGSLRLSCAASGFTFDDYAMS |
| | | | WVRQVPGKGLEWVSSINWSGTHTDYADSVKGR |
| | | | FTISRNNANNTLYLQMNSLKSEDTAVYYCAKN |
| | | | WRDAGTTWFEKSGSAGQGTQVTVSS |
| < 27E5-35GS- | , SEQ ID NO: 2213 | ; PRT; -> | EVQLVESGGGLVQAGGSLTLSCTASETTVRIR |
| 2D3 | | | TMAWYRQPPGNQREWVATIGSNGFATYPDSVK |
| | | | GRFTISRDNAKNTVYLQMNSLKPEDTAVYYCR |
| | | | DINRDIWGQGSQVTVSSGGGGSGGGGSGGGGS |
| | | | GGGGSGGGGSGGGGSGGGGSEVQLVESGGSLV |
| | | | QPGGSLRLSCAASGFTFDDYAMSWVRQVPGKG |
| | | | LEWVSSINWSGTHTDYADSVKGRFTISRNNAN |
| | | | NTLYLQMNSLKSEDTAVYYCAKNWRDAGTTWF |
| | | | EKSGSAGQGTQVTVSS |
| < 27F2-35GS- | , SEQ ID NO: 2214 | ; PRT; -> | EVQLVESGGGLVQAGGSLRLSCAASGIISSFR |
| 2D3 | | | TLAWYRQAPGKQRDWVATISSAGGTAYADAVK |
| | | | GRFTISISRDNVEYTVDLQMDSLKPEDTAVYY |
| | | | CRDINGDYWGQGTQVTVSSGGGGSGGGGSGGG |
| | | | GSGGGGSGGGGSGGGGSGGGGSEVQLVESGGS |
| | | | LVQGGSLRLSCAASGFTFDDYAMSWVRQVPG |
| | | | KGLEWVSSINWSGTHTDYADSVKGRFTISRNN |
| | | | ANNTLYLQMNSLKSEDTAVYYCAKNWRDAGTT |
| | | | WFEKSGSAGQGTQVTVSS |
| < 27D6-35GS- | , SEQ ID NO: 2215 | ; PRT; -> | EVQLVESGGGLVQAGGSLTLSCTASETTVRIR |
| 2D3 | | | TMAWYRQPPGNQREWVATIGSNGFATYPDSVK |
| | | | GRFTISRDNAKNTVYLQMNSLKPEDTAVYYCR |
| | | | DINRDIWGQGSQVTVSSGGGGSGGGGSGGGGS |
| | | | GGGGSGGGGSGGGGSGGGGSEVQLVESGGSLV |
| | | | QPGGSLRLSCAASGFTFDDYAMSWVRQVPGKG |
| | | | LEWVSSINWSGTHTDYADSVKGRFTISRNNAN |
| | | | NTLYLQMNSLKSEDTAVYYCAKNWRDAGTTWF |
| | | | EKSGSAGQGTQVTVSS |
| < 30D10-35GS- | , SEQ ID NO: 2216 | ; PRT; -> | EVQLVESGGGLVQAGGSLTLSCTASETTVRIR |
| 2D3 | | | TMAWYRQPPGNQREWVATIGSNGFATYPDSVK |
| | | | GRFTISRDNAKNTVYLQMNSLKPEDTAVYYCR |
| | | | DINRDIWGQGSQVTVSSGGGGSGGGGSGGGGS |
| | | | GGGGSGGGGSGGGGSGGGGSEVQLVESGGSLV |
| | | | QPGGSLRLSCAASGFTFDDYAMSWVRQVPGKG |
| | | | LEWVSSINWSGTHTDYADSVKGRFTISRNNAN |
| | | | NTLYLQMNSLKSEDTAVYYCAKNWRDAGTTWF |
| | | | EKSGSAGQGTQVTVSS |
| < 47D5-35GS- | , SEQ ID NO: 2217 | ; PRT; -> | KVQLVESGGGLVQGGSLRLSCAASGSIFGFN |
| 2D3 | | | DMAWYRQAPGKQRELVALISRVGVTSSADSVK |
| | | | GRFTISRVNAKDTVYLQMNSLKPEDTAVYYCY |
| | | | MDQRLDGSTLAYWGQGTQVTVSSGGGGSGGGG |
| | | | SGGGGSGGGGSGGGGSGGGGSGGGGSEVQLVE |
| | | | SGGSLVQPGGSLRLSCAASGFTFDDYAMSWVR |
| | | | QVPGKGLEWVSSINWSGTHTDYADSVKGRFTI |
| | | | SRNNANNTLYLQMNSLKSEDTAVYYCAKNWRD |
| | | | AGTTWFEKSGSAGQTQVTVSS |
| < DUMMY-35GS- | , SEQ ID NO: 2218 | ; PRT; -> | EVQLVESGGGLVQAGGSLRLSCAASGRTFRSY |
| 2D3 | | | PMGWFRQAPGKEREFVASITGSGGSTYYADSV |
| | | | KGRFTISRDNAKNTVYLQMNSLRPEDTAVYSC |
| | | | AAYIRPDTYLSRDYRKYDYWGQGTQVTVSSGG |
| | | | GGSGGGGSGGGGSGGGGSGGGGSGGGGSGGGG |
| | | | SEVQLVESGGSLVQPGGSLRLSCAASGFTFDD |
| | | | YAMSWVRQVPGKGLEWVSSINWSGTHTDYADS |
| | | | VKGRFTISRNNANNTLYLQMNSLKSEDTAVYY |
| | | | CAKNWRDAGTTWFEKSGSAGQGTQVTVSS |
| < 2D3-35GS- | , SEQ ID NO: 2219 | ; PRT; -> | EVQLVESGGSLVQPGGSLRLSCAASGFTFDDY |
| 2D3 | | | AMSWVRQVPGKGLEWVSSINWSGTHTDYADSV |
| | | | KGRFTISRNNANNTLYLQMNSLKSEDTAVYYC |
| | | | AKNWRDAGTTWFEKSGSAGQGTQVTVSSGGGG |
| | | | SGGGGSGGGGSGGGGSGGGGSGGGGSGGGGSE |
| | | | VQLVESGGSLVQPGGSLRLSCAASGFTFDDYA |
| | | | MSWVRQVPGKGLEWVSSINWSGTHTDYADSVK |
| | | | GRFTISRNNANNTLYLQMNSLKSEDTAVYYCA |
| | | | KNWRDAGTTWFEKSGSAGQGTQVTVSS |
| < DUMMY-35GS- | , SEQ ID NO: 2220 | ; PRT; -> | EVQLVESGGGLVQAGGSLRLSCAASGRTFRSY |
| 47D5 | | | PMGWERQAPGKEREFVASITGSGGSTYYADSV |
| | | | KGRFTISRDNAKNTVYLQMNSLRPEDTAVYSC |
| | | | AAYIRPDTYLSRDYRKYDYWGQGTQVTVSSGG |
| | | | GGSGGGGSGGGGSGGGGSGGGGSGGGGSGGGG |
| | | | SEVQLVESGGGLVQPGGSLRLSCAASGSIFGF |
| | | | NDMAWYRQAPGKQRELVALISRVGVTSSADSV |
| | | | KGRFTISRVNAKDTVYLQMNSLKPEDTAVYYC |
| | | | YMDQRLDGSTLAYWGQGTQVTVSS |
| < 5F7-35GS- | , SEQ ID NO: 2221 | ; PRT; -> | EVQLVESGGGLVQAGGSLRLSCAASGITFSIN |
| 47D5 | | | TMGWYRQAPGKQRELVALISSIGDTYYADSVK |
| | | | GRFTISRDNAKNTVYLQMNSLKPEDTAVYYCK |
| | | | RFRTAAQGTDYWGQGTQVTVSSGGGGSGGGGS |
| | | | GGGGSGGGGSGGGGSGGGGSGGGGSEVQLVES |
| | | | GGGLVQPGGSLRLSCAASGSIFGFNDMAWYRQ |
| | | | APGKQRELVALISRVGVTSSADSVKGRFTISR |
| | | | VNAKDTVYLQMNSLKPEDTAVYYCYMDQRLDG |
| | | | STLAYWGQGTQVTVSS |
| < 47D5-35GS- | , SEQ ID NO: 2222 | ; PRT; -> | KVQLVESGGGLVQPGGSLRLSCAASGSIFGFN |
| 5F7 | | | DMAWYRQAPGKQRELVALISRVGVTSSADSVK |
| | | | GRFTISRVNAKDTVYLQMNSLKPEDTAVYYCY |
| | | | MDQRLDGSTLAYWGQGTQVTVSSGGGGSGGGG |
| | | | SGGGGSGGGGSGGGGSGGGGSGGGGSEVQLVE |
| | | | SGGGLVQAGGSLRLSCAASGITFSINTMGWYR |
| | | | QAPGKQRELVALISSIGDTYYADSVKGRFTIS |
| | | | RDNAKNTVYLQMNSLKPEDTAVYYCKRFRTAA |
| | | | QGTDYWGQGTQVTVSS |
| < 2D3-35GS- | , SEQ ID NO: 2223 | ; PRT; -> | EVQLVESGGSLVQPGGSLRLSCAASGFTFDDY |
| 47D5 | | | AMSWVRQVPGKGLEWVSSINWSGTHTDYADSV |
| | | | KGRFTISRNNANNTLYLQMNSLKSEDTAVYYC |
| | | | AKNWRDAGTTWFEKSGSAGQGTQVTVSSGGGG |
| | | | SGGGGSGGGGSGGGGSGGGGSGGGGSGGGGSE |
| | | | VQLVESGGGLVQPGGSLRLSCAASGSIFGFND |
| | | | MAWYRQAPGKQRELVALISRVGVTSSADSVKG |
| | | | RFTISRVNAKDTVYLQMNSLKPEDTAVYYCYM |
| | | | DQRLDGSTLAYWGQGTQVTVSS |
| < 27F7-35GS- | , SEQ ID NO: 2224 | ; PRT; -> | EVQLVESGGGLVQAGGSLRLSCVVSGIPSTIR |
| 2D3 | | | AMAWYRQAPGRQRDWVATIYSPSGSAVYADSV |
| | | | KGRFTISSDNAKKTIYLQMNSLKPDDTAVYYC |
| | | | RDVNREYWGQGTQVTVSSGGGGSGGGGSGGGG |
| | | | SGGGGSGGGGSGGGGSGGGGSEVQLVESGGSL |
| | | | VQPGGSLRLSCAASGFTEDDYAMSWVRQVPGK |
| | | | GLEWVSSINWSGTHTDYADSVKGRFTISRNNA |
| | | | NNTLYLQMNSLKSEDTAVYYCAKNWRDAGTTW |
| | | | FEKSGSAGQGTQVTVSS |
| < 28F6-35GS- | , SEQ ID NO: 2225 | ; PRT; -> | EVQLVESGGGLVQAGGSLNLSCVASGIPFSTR |
| 2D3 | | | TMAWYRQPPGNERDWVATIRSGAPVYADSVKG |
| | | | RFTVSRDNAKNTLYLQMNSLEPEDTATYYCWD |
| | | | VNGDIWGQGTPVTVSSGGGGSGGGGSGGGGSG |
| | | | GGGSGGGGSGGGGSGGGGSEVQLVESGGSLVQ |
| | | | PGGSLRLSCAASGFTFDDYAMSWVRQVRGKGL |
| | | | EWVSSINWSGTHTDYADSVKGRFTISRNNANN |
| | | | TLYLQMNSLKSEDTAVYYCAKNWRDAGTTWFE |
| | | | KSGSAGQGTQVTVSS |
| < 28G3-35GS- | , SEQ ID NO: 2226 | ; PRT; -> | EVQLVESGGGLVQAGGSLNLSCVASGIPFSTR |
| 2D3 | | | TMAWYRQPPGNERDWVATIRSGAPVYADSVKG |
| | | | RFTVSRDNAKNTLYLQMNSLEPEDTATYYCWD |
| | | | VNGDIWGQGTPVTVSSGGGGSGGGGSGGGGSG |
| | | | GGGSGGGGSGGGGSGGGGSEVQLVESGGSLVQ |
| | | | PGGSLRLSCAASGFTFDDYAMSWVRQVPGKGL |
| | | | EWVSSINWSGTHTDYADSVKGRFTISRNNANN |
| | | | TLYLQMNSLKSEDTAVYYCAKNWRDAGTTWFE |
| | | | KSGSAGQGTQVTVSS |
| < 28G5-35GS- | , SEQ ID NO: 2227 | ; PRT; -> | EVQLVESGGGLVQAGGSLRLSCVTSRRPASTR |
| 2D3 | | | TMAWYRQAPGKQRDWVATISSHGLPVYADSVK |
| | | | GRFTVSRDNANNTVYLQMNTLKPEDTAVYYCR |
| | | | DVNADYWGQGTQVTVSSGGGGSGGGGSGGGGS |
| | | | GGGGSGGGGSGGGGSGGGGSEVQLVESGGSLV |
| | | | QPGGSLRLSCAASGFTFDDYAMSWVRQVPGKG |
| | | | LEWVSSINWSGTHTDYADSVKGRFTISRNNAN |
| | | | NTLYLQMNSLKSEDTAVYYCAKNWRDAGTTWF |
| | | | EYSGSAGQGTQVTVSS |
| < 29D9-35GS- | , SEQ ID NO: 2228 | ; PRT; -> | EVQLVESGGGLVQPGGSLRLSCAASRIPFSTR |
| 2D3 | | | TMAWYRQAPGKQRDWVATIGTSGPPRYADSVK |
| | | | GRFTVSRDNAKNTVYLQMNSLKAEDTAVYYCW |
| | | | DVNADYWGQGTQVTVSSGGGGSGGGGSGGGGS |
| | | | GGGGSGGGGSGGGGSGGGGSEVQLVESGGSLV |
| | | | QPGGSLRLSCAASGFTFDDYAMSWVRQVPGKG |
| | | | LEWVSSINWSGTHTDYADSVKGRFTISRNNAN |
| | | | NTLYLQMNSLKSEDTAVYYCAKNWRDAGTTWF |
| | | | EKSGSAGQGTQVTVSS |
| < 29E9-35GS- | , SEQ ID NO: 2229 | ; PRT; -> | EVQLVESGGGLVQPGGSLRLSCVASRIPASIR |
| 2D3 | | | TMAWYRQTPGNQRDWLATIGSSGTPAYADSVK |
| | | | GRFTVSRDNAKNTVYLQMNSLKPEDTAVYYCR |
| | | | DVNGDYWGQGTQVTVSSGGGGSGGGGSGGGGS |
| | | | GGGGSGGGGSGGGGSGGGGSEVQLVESGGSLV |
| | | | QPGGSLRLSCAASGFTEDDYAMSWVRQVPGKG |
| | | | LEWVSSINWSGTHTDYADSVKGRFTISRNNAN |
| | | | NTLYLQMNSLKSEDTAVYYCAKNWRDAGTTWF |
| | | | EKSGSAGQGTQVTVSS |
| < 30E10-35GS- | , SEQ ID NO: 2230 | ; PRT; -> | KVQLVESGGSLVPPGGSLRLSCAASGFTFDDY |
| 2D3 | | | AMTWVRQAPGKGLEWVSSINWSGTHTDYTDSV |
| | | | KGRFTISRNNANNTLYLQMNSLKSEDTAVYYC |
| | | | AKNWGDAGTTWFEKSGSAGQGTQVTVSSGGGG |
| | | | SGGGGSGGGGSGGGGSGGGGSGGGGSGGGGSE |
| | | | VQLVESGGSLVQPGGSLRLSCAASGFTFDDYA |
| | | | MSWVRQVPGKGLEWVSSINWSGTHTDYADSVK |
| | | | GRFTISRNNANNTLYLQMNSLKSEDTAVYYCA |
| | | | KNWRDAGTTWFEKSGSAGQGTQVTVSS |
| < 31D11-35GS- | , SEQ ID NO: 2231 | ; PRT; -> | EVQLVESGGGLVQAGGSLNLSCVASGIPFSTR |
| 2D3 | | | TMAWYRQPPGNERDWVATIRSGAPVYADSVKG |
| | | | RFTVSRDNAKNTLYLQMNSLEPEDTATYYCWD |
| | | | VNGDIWGQGTPVTVSSGGGGSGGGGSGGGGSG |
| | | | GGGSGGGGSGGGGSGGGGSEVQLVESGGSLVQ |
| | | | PGGSLRLSCAASGFTFDDYAMSWVRQVPGKGL |
| | | | EWVSSINWSGTHTDYADSVKGRFTISRNNANN |
| | | | TLYLQMNSLKSEDTAVYYCAKNWRDAGTTWFE |
| | | | KSGSAGQGTQVTVSS |
| < 27G2-35GS- | , SEQ ID NO: 2232 | ; PRT; -> | EVQLVESGGSLVQPGGSLRLSCAASGFTFDDY |
| 2D3 | | | AMTWVRQTPGKGLEWVSSINWSGTHTDYTDSV |
| | | | KGRFTISRNNANNTLYLQMNSLKSDDTAVYYC |
| | | | AKNWGDAGTTWFEKSGSAGPGTQVTVSSGGGG |
| | | | SGGGGSGGGGSGGGGSGGGGSGGGGSGGGGSE |
| | | | VQLVESGGSLVQPGSSLRLSCAASGFTFDDYA |
| | | | MSWVRQVPGKGLEWVSSINWSGTHTDYADSVK |
| | | | GRFTISRNNANNTLYLQMNSLKSEDTAVYYCA |
| | | | KNWRDAGTTWFEKSGSAGQGTQVTVSS |
| < P27G4-35GS- | , SEQ ID NO: 2233 | ; PRT; -> | EVQLVESGGGLVQAGGSLRLSCVTSRRPASTR |
| 2D3 | | | TMAWYRQAPGKQRDWVATISSHGLPVYADSVK |
| | | | GRFTVSRDNANNTVYLQMNTLKPEDTAVYYCR |
| | | | DVNADYWGQGTQVTVSSGGGGSGGGGSGGGGS |
| | | | GGGGSGGGGSGGGGSGGGGSEVQLVESGGSLV |
| | | | QPGGSLRLSCAASGFTFDDYAMSWVRQVPGKG |
| | | | LEWVSSINWSGTHTDYADSVKGRFTISRNNAN |
| | | | NTLYLQMNSLKSEDTAVYYCAKNWRDAGTTWF |
| | | | EKSGSAGQGTQVTVSS |
| < 27G5-35GS- | , SEQ ID NO: 2234 | ; PRT; -> | EVQLVESGGGLVQPGGSLRLSCVASRIPASIR |
| 2D3 | | | TMAWYRQTPGNQRDWLATIGSSGTPAYADSVK |
| | | | GRFTVSRDNAKFTVYLQMNSLKPEDTAVYYCR |
| | | | DVNGDYWGQGTQVTVSSGGGGSGGGGSGGGGS |
| | | | GGGGSGGGGSGGGGSGGGGSEVQLVESGGSLV |
| | | | QPGGSLRLSCAASGFTFDDYAMSWVRQVPGKG |
| | | | LEWVSSINWSGTHTDYADSVKGRFTISRNNAN |
| | | | NTLYLQMNSLKSEDTAVYYCAKNWRDAGTTWF |
| | | | EKSGSAGQGTQVTVSS |
| < 27G7-35GS- | , SEQ ID NO: 2235 | ; PRT; -> | EVQLVESGGGLVQAGGSLRLSCVTSRRPASTR |
| 2D3 | | | TMAWYRQAPGKQRDWVATISSHGLPVYADSVK |
| | | | GRFTVSRDNANNTVYLQMNTLKPEDTAVYYCR |
| | | | DVNADYWGQGTQVTVSSGGGGSGGGGSGGGGS |
| | | | GGGGSGGGGSGGGGSGGGGSEVQLVESGGSLV |
| | | | QPGGSLRLSCAASGFTFDDYAMSWVRQVPGKG |
| | | | LEWVSSINWSGTHTDYADSVKGRFTISRNNAN |
| | | | NTLYLQMNSLKSEDTAVYYCAKNWRDAGTTWF |
| | | | EKSGSAGQGTQVTVSS |
| < 27H1-35GS- | , SEQ ID NO: 2236 | ; PRT; -> | EVQLVESGGGLVQAGGSLRLSCVTSRRPASTR |
| 2D3 | | | TMAWYRQAPGKQRDWVATISSHGLPVYADSVK |
| | | | GRFTVSRDNANNTVYLQMNTLKPEDTAVYYCR |
| | | | DVNADYWGQGTQVTVSSGGGGSGGGGSGGGGS |
| | | | GGGGSGGGGSGGGGSGGGGSEVQLVESGGSLV |
| | | | QPGGSLRLSCAASGFTFDDYAMSWVRQVPGKG |
| | | | LEWVSSINWSGTHTDYADSVKGRFTISRNNAN |
| | | | NTLYLQMNSLKSEDTAVYYCAKNWRDAGTTWF |
| | | | EKSGSAGQGTQVTVSS |
| < 27H2-35GS- | , SEQ ID NO: 2237 | ; PRT; -> | EVQLVESGGGLVQAGGSLRLSCVTSRRPASTR |
| 2D3 | | | TMAWYRQAPGKQRDWVATISSHGLPVYADSVK |
| | | | GRFTVSRDNANNTVYLQMNTLKPEDTAVYYCR |
| | | | DVNADYWGQGTQVTVSSGGGGSGGGGSGGGGS |
| | | | GGGGSGGGGSGGGGSGGGGSEVQLVESGGSLV |
| | | | QPGGSLRLSCAASGFTFDDYAMSWVRQVPGKG |
| | | | LEWVSSINWSGTHTDYADSVKGRFTISRNNAN |
| | | | NTLYLQMNSLKSEDTAVYYCAKNWRDAGTTWF |
| | | | EKSGSAGQGTQVTVSS |
| < 27H3-35GS- | , SEQ ID NO: 2238 | ; PRT; -> | EVQLVESGGSLVQPGGSLRLSCAASGFTFDDY |
| 2D3 | | | AMTWVRQASGKGLEWVSSINWSGTHTDYTDSV |
| | | | KGRFTISRNNANNTLYLQMNSLKSEDTAVYYC |
| | | | AKNWGDAGTTWFEKSGSAGQGTQVTVSSGGGG |
| | | | SGGGGSGGGGSGGGGSGGGGSGGGGSGGGGSE |
| | | | VQLVESGGSLVQPGGSLRLSCAASGFTFDDYA |
| | | | MSWVRQVPGKGLEWVSSINWSGTHTDYADSVK |
| | | | GRFTISRNNANNTLYLQMNSLKSEDTAVYYCA |
| | | | KNWRDAGTTWFEKSGSAGQGTQVTVSS |
| < 27H4-35GS- | , SEQ ID NO: 2239 | ; PRT; -> | EVQLVESGGGLVQAGGSLRLSCVASKMTFMRY |
| 2D3 | | | TMGWYRQAPGKQRDLVASIDASGGTNYADSVK |
| | | | GRFTISRDNAKNTVYLEMNSLKPEDTGVYYCN |
| | | | GRWDIVGAIWWGQGTQVTVSSQGGGSGGGGSG |
| | | | GGGSGGGGSGGGGSGGGGSGGGGSEVQLVESG |
| | | | GSLVQPGGSLRLSCAASGFTFDDYAMSWVRQV |
| | | | PGKGLEWVSSINWSGTHTDYADSVKGRFTISR |
| | | | NNANNTLYLQMNSLKSEDTAVYYCAKNWRDAG |
| | | | TTWFEKSGSAGQGTQVTVSS |
| < 27H5-35GS- | , SEQ ID NO: 2240 | ; PRT; -> | EVQLVESGGGLVQAGGSLRLSCAASGFTFDDY |
| 2D3 | | | GIGWFRQASGKEREGVSCITSSDGSTYYADSV |
| | | | KGRFTISSDNAKNTVYLQMNSLKPEDTAVYYC |
| | | | AALPFVCPSGSYSDYGDEYDYWGQGTQVTVSS |
| | | | GGGGSGGGGSGGGGSGGGGSGGGGSGGGGSGG |
| | | | GGSEVQLVESGGSLVQPGGSLRLSCAASGFTF |
| | | | DDYAMSWVRQVPGKGLEWVSSINWSGTHTDYA |
| | | | DSVKGRFTISRNNANNTLYLQMNSLKSEDTAV |
| | | | YYCAKNWRDAGTTWFEKSGSAGQGTQTVSS |
| < 27H7-35GS- | , SEQ ID NO: 2241 | ; PRT; -> | EVQLVESGGGLVQAGGSLRLSCAASGIAFRIR |
| 2D3 | | | TMAWYRQAPGKQRDWVATSDSGGTTLYADSVK |
| | | | GRFTVSRDNAENTVYLQMNSLKPEDTAVYYGR |
| | | | DVNRDYWGQGTQVTVSSGGGGSGGGGSGGGGS |
| | | | GGGGSGGGGSGGGGSGGGGSEVQLVESGGSLV |
| | | | QPGGSLRLSCAASGFTFDDYAMSWVRQVPGKG |
| | | | LEWVSSINWSGTHTDYADSVKGRFTISRNNAN |
| | | | NTLYLQMNSLKSEDTAVYYCAKNWRDAGTTWF |
| | | | EKSGSAGQGTQVTVSS |
| < 27A3-35GS- | , SEQ ID NO: 2242 | ; PRT; -> | EVQLVESGGGLVQAGGSLSLSCVASGRFFSTR |
| 2D3 | | | VMAWYRQTPGKQREFVASMRGSGSTNYADSVR |
| | | | GRFAISRDNAKNTVYLQMNTLKPEDTAVYYCR |
| | | | DINEDQWGQGTQVTVSSGGGGSGGGGSGGGGS |
| | | | GGGGSGGGGSGGGGSGGGGSEVQLVESGGSLV |
| | | | QPGGSLRLSCAASGFTFDDYAMSWVRQVPGKG |
| | | | LEWVSSINWSGTHTDYADSVKGRFTISRNNAN |
| | | | NTLYLQMNSLKSEDTAVYYCAKNWRDAGTTWF |
| | | | EKSGSAGQGTQVTVSS |
| < 27A4-35GS- | , SEQ ID NO: 2243 | ; PRT; -> | EVQLVESGGGLVQAGGSLRLSCVTSRRPASTR |
| 2D3 | | | TMAWYRQAPGKQRDWVATISSHGLPVYADSVK |
| | | | GRFTVSRDNANNTVYLQMNTLKPEDTAVYYCR |
| | | | DVNADYWGQGTQVTVSSGGGGSGGGGSGGGGS |
| | | | GGGGSGGGGSGGGGSGGGGSEVQLVESGGSLV |
| | | | QPGGSLRLSCAASGFTFDDYAMSWVRQVPGKG |
| | | | LEWVSSINWSGTHTDYADSVKGRFTISRNNAN |
| | | | NTLYLQMNSLKSEDTAVYYCAKNWRDAGTTWF |
| | | | EKSGSAGQGTQVTVSS |
| < 27A5-35GS- | , SEQ ID NO: 2244 | ; PRT; -> | EVQLVESGGGLVQAGGSLNLSCVASGIPFSTR |
| 2D3 | | | TMAWYRQPPGNERDWVATIRSGAPVYADSVKG |
| | | | RFTVSRDNAKNTLYLQMNSLEPEDTATYYCWD |
| | | | VNGDIWGQGTPVTVSSGGGGSGGGGSGGGGSG |
| | | | GGGSGGGGSGGGGSGGGGSEVQLVESGGSLVQ |
| | | | PGGSLRLSCAASGFTEDDYAMSWVRQVPGKGL |
| | | | EWVSSINWSGTHTDYADSVKGRFTISRNNANN |
| | | | TLYLQMNSLKSEDTAVYYCAKNWRDAGTTWFE |
| | | | KSGSAGQGTQVTVSS |
| < 27B1-35GS- | , SEQ ID NO: 2245 | ; PRT; -> | EVQLVESGGSLVQPGGSLRLSCAASGFTFDDY |
| 2D3 | | | AMSWVRQAPGKGLEWISSINWSGTHTDYADSV |
| | | | KGRFTISRNNANNTLYLQMNNLKFEDTAVYYC |
| | | | AKNWRDAGTTWFEKSGSAGQGTQVTVSSGGGG |
| | | | SGGGGSGGGGSGGGGSGGGGSGGGGSGGGGSE |
| | | | VQLVESGGSLVQPGGSLRLSCAASGFTFDDYA |
| | | | MSWVRQVPGKGLEWVSSINWSGTHTDYADSVK |
| | | | GRFTISRNNANNTLYLQMNSLKSEDTAVYYCA |
| | | | KNWRDAGTTWFEKSGSAGQGTQVTVSS |
| < 27B2-35GS- | , SEQ ID NO: 2246 | ; PRT; -> | EVQLVESGGGLVQAGGSLRLSCVASGIPSIRA |
| 2D3 | | | IAWYRQAPGKQRDWVATSGTGYGATYDDSVKG |
| | | | RFTLSRDNAKNTVYLQMNSLKPEDTAVYYCRD |
| | | | VNRDYWGQGTQVTVSSGGGGSGGGGSGGGGSG |
| | | | GGGSGGGGSGGGGSGGGGSEVQLVESGGSLVQ |
| | | | PGGSLRLSCAASGFTFDDYAMSWVRQVPGKGL |
| | | | EWVSSINWSGTHTDYADSVKGRFTISRNNANN |
| | | | TLYLQMNSLKSEDTAVYYCAKNWRDAGTTWFE |
| | | | KSGSAGQGTQVTVSS |
| < 27B5-35GS- | , SEQ ID NO: 2247 | ; PRT; -> | EVQLVESGGGLVQAGGSLRLPCAASGIAFRIR |
| 2D3 | | | TMAWYRQAPGKQRDWVATSDSGGTTLYADSVK |
| | | | GRFTVSRDNAENTVYLQMNSLKPEDTAVYYCR |
| | | | DVNRDYWGQGTQVTVSSGGGGSGGGGSGGGGS |
| | | | GGGGSGGGGSGGGGSGGGGSEVQLVESGGSLV |
| | | | QPGGSLRLSCAASGFTFDDYAMSWVRQVPGKG |
| | | | LEWVSSINWSGTHTDYADSVKGRFTISRNNAN |
| | | | NTLYLQMNSLKSEDTAVYYCAKNWRDAGTTWF |
| | | | EKSGSAGQGTQVTVSS |
| < 27B7-35GS- | , SEQ ID NO: 2248 | ; PRT; -> | EVQLVESGGGLVQPGGSLRLSCAASGFTFSSY |
| 2D3 | | | AMSWVRQAPGKGLEWVSAISSGGGSITTYADS |
| | | | VKGRFTISRDNAKNTLYLQMSSLKPEDTALYY |
| | | | CAKARSSSSYYDFGSWGQGTQVTVSSGGGGSG |
| | | | GGGSGGGGSGGGGSGGGGSGGGGSGGGGSEVQ |
| | | | LVESGGSLVQPGGSLRLSCAASGFTFDDYAMS |
| | | | WVRQVPGKGLEWVSSINWSGTHTDYADSVKGR |
| | | | FTISRNNANNTLYLQMNSLKSEDTAVYYCAKN |
| | | | WRDAGTTWFEKSGSAGQGTQVTVSS |
| < 27C2-35GS- | , SEQ ID NO: 2249 | ; PRT; -> | EVQLVESGGSLVQPGGSLRLSCAASGFTFDDY |
| 2D3 | | | AMTWVRQASGKGLEWVSSINWSGTHTDYTDSV |
| | | | KGRFTISRNNANNTLYLQMNSLKSEDTAVYYC |
| | | | AKNWGDAGTTWFEKSGSAGQGTQVTVSSGGGG |
| | | | SGGGGSGGGGSGGGGSGGGGSGGGGSGGGGSE |
| | | | VQLVESGGSLVQPGGSLRLSCAASGFTFDDYA |
| | | | MSWVRQVPGKGLEWVSSINWSGTHTDYADSVK |
| | | | GRFTISRNNANNTLYLQMNSLKSEDTAVYYCA |
| | | | KNWRDAGTTWFEKSGSAGQGTQVTVSS |
| < 27C5-35GS- | , SEQ ID NO: 2250 | ; PRT; -> | EVQLVESGGGLVQAGGSLNLSCVASGIPFSTR |
| 2D3 | | | TMAWYRQPPGNERDWVATIRSGAPVYADSVKG |
| | | | RFTVSRDNAKNTLYLQMNSLEPEDTATYYCWD |
| | | | VNGDIWGQGTPVTVSSGGGGSGGGGSGGGGSG |
| | | | GGGSGGGGSGGGGSGGGGSEVQLVESGGSLVQ |
| | | | PGGSLRLSCAASGFTFDDYAMSWVRQVPGKGL |
| | | | EWVSSINWSGTHTDYADSVKGRFTISRNNANN |
| | | | TLYLQMNSLKSEDTAVYYCAKNWRDAGTTWFE |
| | | | KSGSAGQGTQVTVSS |
| < 27C7-35GS- | , SEQ ID NO: 2251 | ; PRT; -> | EVQLVESGGGLVQAGGSLRLSCAASGIAFRIR |
| 2D3 | | | TMAWYRQAPGKQRDWVATSDSGGTTLYADSVK |
| | | | GRFTVSRDNADNTVYLQMNSLKPEDTAVYYCR |
| | | | DVNRDYWGQGTQVTVSSGGGGSGGGGSGGGGS |
| | | | GGGGSGGGGSGGGGSGGGGSEVQLVESGGSLV |
| | | | QPGGSLRLSCAASGFTFDDYAMSWVRQVPGKG |
| | | | LEWVSSINWSGTHTDYADSVKGRFTISRNNAN |
| | | | NTLYLQMNSLKSEDTAVYYCAKNWRDAGTTWF |
| | | | EKSGSAGQGTQVTVSS |
| < 27D1-35GS- | , SEQ ID NO: 2252 | ; PRT; -> | EVQLVESGGGLVQPGGSLRLSCVASGFSLDDY |
| 2D3 | | | GMTWVRQAPGKGLEWVSSINWSGTHTDYADSV |
| | | | KGRFTISRDNAKNTLFLQMNSLTPEDTAVYYC |
| | | | NQGWKILPAERRGHGTQVTVSSGGGGSGGGGS |
| | | | GGGGSGGGGSGGGGSGGGGSGGGGSEVQLVES |
| | | | GGSLVQPGGSLRLSCAASGFTFDDYAMSWVRQ |
| | | | VPGKGLEWVSSINWSGTHTDYADSVKGRFTIS |
| | | | RNNANNTLYLQMNSLKSEDTAVYYCAKNWRDA |
| | | | GTTWFEKSGSAGQGTQVTVSS |
| < 27D2-35GS- | , SEQ ID NO: 2253 | ; PRT; -> | EVQLVESGGGLVQPGGSLRLSCAASGLGIAFS |
| 2D3 | | | RRTMAWYRQAPGKQRDWVATIAGDGSTVYADS |
| | | | MKGRFTISRDNAKNTVYLQVNSLKPEDTAVYY |
| | | | CWDTNGDYWGQGTQVTVSSGGGGSGGGGSGGG |
| | | | GSGGGGSGGGGSGGGGSGGGGSEVQLVESGGS |
| | | | LVQPGGSLRLSCAASGFTFDDYAMSWVRQVPG |
| | | | KGLEWVSSINWSGTHTDYADSVKGRFTISRNN |
| | | | ANNTLYLQMNSLKSEDTAVYYCAKNWRDAGTT |
| | | | WFEKSGSAGQGTQVTVSS |
| < 27D3-35GS- | , SEQ ID NO: 2254 | ; PRT; -> | EVQLMESGGGLVQPGGSLRLSCAASGLGIAFS |
| 2D3 | | | RRTMAWYRQAPGKQRDWVATIAGDGSTVYADS |
| | | | MKGRFTISRDNAENTVYLQMNSLKPEDTAVYY |
| | | | CWDVNRDYWGQGTQVTVSSGGGGSGGGGSGGG |
| | | | GSGGGGSGGGGSGGGGSGGGGSEVQLVESGGS |
| | | | LVQPGGSLRLSCAASGFTFDDYAMSWVRQVPG |
| | | | KGLEWVSSINWSGTHTDYADSVKGRFTISRNN |
| | | | ANNTLYLQMNSLKSEDTAVYYCAKNWRDAGTT |
| | | | WFEKSGSAGQGTQVTVSS |
| < 27D4-35GS- | , SEQ ID NO: 2255 | ; PRT; -> | EVQLVESGGSLVQPGGSLRLSCAASGFTFDDY |
| 2D3 | | | AMTWVRQASGKGLEWVSSINWSGTHTDYADSV |
| | | | KGRFTISRNNANNTLYLQMNSLKSEDTAVYYC |
| | | | AKNWGDAGTTWFEKSGSAGQGTQVTVSSGGGG |
| | | | SGGGGSGGGGSGGGGSGGGGSGGGGSGGGGSE |
| | | | VQLVESGGSLVQPGGSLRLSCAASGFTFDDYA |
| | | | MSWVRQVPGKGLEWVSSINWSGTHTDYADSVK |
| | | | GRFTISRNNANNTLYLQMNSLKSEDTAVYYCA |
| | | | KNWRDAGTTWFEKSGSAGQGTQVTVSS |
| < 27D7-35GS- | , SEQ ID NO: 2256 | ; PRT; -> | EVQLVESGGGLVQPGGSLRLSCVASGFSLDDY |
| 2D3 | | | GMTWVRQAPGKGLEWVSSINWSGTHTDYADSV |
| | | | KGRFTISRDNAKNTLFLQMNSLSPEDTAVYYC |
| | | | NQGWKILPTNRGSHGTQVTVSSGGGGSGGGGS |
| | | | GGGGSGGGGSGGGGSGGGGSGGGGSEVQLVES |
| | | | GGSLVQPGGSLRLSCAASGFTFDDYAMSWVRQ |
| | | | VPGKGLEWVSSINWSGTHTDYADSVKGRFTIS |
| | | | RNNANNTLYLQMNSLKSEDTAVYYCAKNWRDA |
| | | | GTTWFEKSGSAGQGTQVTVSS |
| < 27E2-35GS- | , SEQ ID NO: 2257 | ; PRT; -> | EVQLVESGGGLVQPGGSLRLSCVASGFSLDDY |
| 2D3 | | | GMTWVRQAPGKGLEWVSSINWSGTHTDYADSV |
| | | | KGRFTISRDNAKNTLFLQMNSLTPEDTAVYYC |
| | | | NQGWKIIPTDRRGHGTQVTVSSGGGGSGGGGS |
| | | | GGGGSGGGGSGGGGSGGGGSGGGGSEVQLVES |
| | | | GGSLVQPGGSLRLSCAASGFTFDDYAMSWVRQ |
| | | | VPGKGLEWVSSINWSGTHTDYADSVKGRFTIS |
| | | | RNNANNTLYLQMNSLKSEDTAVYYCAKNWRDA |
| | | | GTTWFEKSGSAGQGTQVTVSS |
| < 27E4-35GS- | , SEQ ID NO: 2258 | ; PRT; -> | EVQLVESGGGLVQAGGSLRLSCAASGSTFSIN |
| 2D3 | | | RMAWYRQSPGKQRELVAAVDNDDNTEYSDSVA |
| | | | GRFTISRDNAKNAVHLQMNSLRLEDTAVYYCN |
| | | | AKQLPYLQNFWGQGTQVTVSSGGGGSGGGGSG |
| | | | GGGSGGGGSGGGGSGGGGSGGGGSEVQLVESG |
| | | | GSLVQPGGSLRLSCAASGFTFDDYAMSWVRQV |
| | | | PGKGLEWVSSINWSGTHTDYADSVKGRFTISR |
| | | | NNANNTLYLQMNSLKSEDTAVYYCAKNWRDAG |
| | | | TTWFEKSGSAGQGTQVTVSS |
| < 27E7-35GS- | , SEQ ID NO: 2259 | ; PRT; -> | EVQLVESGGGLVQAGGSLRLSCAASGITFRRY |
| 2D3 | | | DMGWYRQFPGKERELVATILSEGDTNYVDPVK |
| | | | GRFTISRDNAKNTVYLQMNDLKPEDTAVYYCN |
| | | | GVWRAIGRTYWGQGTQVTVSSGGGGSGGGGSG |
| | | | GGGSGGGGSGGGGSGGGGSGGGGSEVQLVESG |
| | | | GSLVQPGGSLRLSCAASGFTFDDYAMSWVRQV |
| | | | PGKGLEWVSSINWSGTHTDYADSVKGRFTISR |
| | | | NNANNTLYLQMNSLKSEDTAVYYCAKNWRDAG |
| | | | TTWFEKSGSAGQGTQVTVSS |
| < 29H1-35GS- | , SEQ ID NO: 2260 | ; PRT; -> | EVQLVESGGSLVPPGGSLRLSCAASGFTFDDY |
| 2D3 | | | AMSWVRQAPGKGLEWVSSINWSGTHTGYTDSV |
| | | | KGRFTISRNNANNTLYLQMNSLKSEDTAVYYC |
| | | | AKNWGDAGTTWFEKSGSAGQGTQVTVSSGGGG |
| | | | SGGGGSGGGGSGGGGSGGGGSGGGGSGGGGSE |
| | | | VQLVESGGSLVQPGGSLRLSCAASGFTFDDYA |
| | | | MSWVRQVPGKGLEWVSSINWSGTHTDYADSVK |
| | | | GRFTISRNNANNTLYLQMNSLKSEDTAVYYCA |
| | | | KNWRDAGTTWFEKSGSAGQGTQVTVSS |
| < 30H9-35GS- | , SEQ ID NO: 2261 | ; PRT; -> | EVQLVESGGSLVQPGGSLRLSCAASGFTFDDY |
| 2D3 | | | AMTWVRQAPGKGLEWVSSINWSGTHTDYTDSV |
| | | | KGRFTISRNNANNTLYLQMNSLKSEDTAVYYC |
| | | | AKNWGDAGTTWFEKSGSAGQGTQVTVSSGGGG |
| | | | SGGGGSGGGGSGGGGSGGGGSGGGGSGGGGSE |
| | | | VQLVESGGSLVQPGGSLRLSCAASGFTFDDYA |
| | | | MSWVRQVPGKGLEWVSSINWSGTHTDYADSVK |
| | | | GRFTISRNNANNTLYLQMNSLKSEDTAVYYCA |
| | | | KNWRDAGTTWFEKSGSAGQGTQVTVSS |
| < 39C1-35GS- | , SEQ ID NO: 2262 | ; PRT; -> | EVQLVESGGSLVPPGGSLRLSCAASGFTFDDY |
| 2D3 | | | GMSWVRQAPGKGLEWVSSINWSGTHTDYTDSV |
| | | | KGRFTISRMNANNTLYLQMNSLKSEDTAVYYC |
| | | | AKNWGDAGTTWFEKSGSAGQGTQVTVSSGGGG |
| | | | SGGGGSGGGGSGGGGSGGGGSGGGGSGGGGSE |
| | | | VQLVESGGSLVQPGGSLRLSCAASGFTFDDYA |
| | | | MSWVRQVPGKGLEWVSSINWSGTHTDYADSVK |
| | | | GRFTISRNNANNTLYLQMNSLKSEDTAVYYCA |
| | | | KNWRDAGTTWFEKSGSAGQGTQVTVSS |
| < 27G8-35GS- | , SEQ ID NO: 2263 | ; PRT; -> | EVQLVESGGGLVQPGGSLRLSCVASGFSLDDY |
| 2D3 | | | GMTWVRQAPGKGLEWVSSINWSGTHTDYADSV |
| | | | KGRFTISRDNAYNTLFLQMNSLTPEDTAVYYC |
| | | | NQGWKILPAERRGHGTQVTVSSGGGGSGGGGS |
| | | | GGGGSGGGGSGGGGSGGGGSGGGGSEVQLVES |
| | | | GGSLVQPGGSLRLSCAASGFTFDDYAMSWVRQ |
| | | | VPGKGLEWVSSINWSGTHTDYADSVKGRFTIS |
| | | | RNNANNTLYLQMNSLKSEDTAVYYCAKNWRDA |
| | | | GTTWFEKSGSAGQGTQVTVSS |
| < 29H2-35GS- | , SEQ ID NO: 2264 | ; PRT; -> | EVQLVESGGGLVQPGGSLRLSCVASGFSLDDY |
| 2D3 | | | GMTWVRQAPGKGLEWVSSINWSGTHTDYADSV |
| | | | KGRFTISRDNAKNTLFLQMNNLTPEDTAVYYC |
| | | | NQGWKIIPTDRRGHGTQVTVSSGGGGSGGGGS |
| | | | GGGGSGGGGSGGGGSGGGGSGGGGSEVQLVES |
| | | | GGSLVQPGGSLRLSCAASGFTFDDYAMSWVRQ |
| | | | VPGKGLEWVSSINWSGTHTDYADSVKGRFTIS |
| | | | RNNANNTLYLQMNSLKSEDTAVYYCAKNWRDA |
| | | | GTTWFEKSGSAGQGTQVTVSS |
| < 38C6-35GS- | , SEQ ID NO: 2265 | ; PRT; -> | EVQLVESGGGLVQPGGSLRLSCVGSGFSLDDY |
| 2D3 | | | AMTWVRQAPGKGLEWVSSINWSGTHTDYADSV |
| | | | KGRFTISRDNAKNTLFLQMNSLSPEDTAVYYQ |
| | | | NQGWKIRPTIPMGHGTQVTVSSGGGGSGGGGS |
| | | | GGGGSGGGGSGGGGSGGGGSGGGGSEVQLVES |
| | | | GGSLVQPGGSLRLSCAASGFTFDDYAMSWVRQ |
| | | | VPGKGLEWVSSINWSGTHTDYADSVKGRFTIS |
| | | | RNNANNTLYLQMNSLKSEDTAVYYCAKNWRDA |
| | | | GTTWFEKSGSAGQGTQVTVSS |

TABLE C-1
Sequence of HER2 binding Nanobodies aligned by family
HERCEPTIN ® COMPETING

| 13D11 | EVQLVESGGGLVHPGGSLRLSCVGSGFSLDDYGMTWVRRAPGKGLEWVSSINWSGTHTDYADSVKGRFTISRDNAKNTLFLQMNSLNPEDTAVYYCGQGWKIVPTNPRGHGTQVTVSS |
|---|---|
| 2B4 | EVQLVESGGGLVQPGGSLRLSCVGSGFSLDDYAMTWVRQAPGKGLEWVSSINWSGTHTDYADSVKGRFTISRDNAKNTLFLQMNSLSPEDTAVYYCNQGWKIRPTIPMGHGTQVTVSS |
| 2G2 | EVQLVESGGGLVQPGGSLRLSCVASGFSLDDYGMTWVRQAPGKGLEWVSSINWSGTHTDYTDPVKGRFTISRDNAKNTLFLQMNNLTPEDTAVYYCNRGWKIVPTDLGGHGTQVTVSS |
| 13D2 | EVQLVESGGGLVQPGGSLRLSCVASGFSLDDYGMTWVRQAPGKGLEWVSSINWSGTHTDYADSVKGRFTISRDNAKNTLFLQMNNLRSEDTAVYSCNQGWKIVPTDRGGHGTQVTVSS |
| 2D5 | EVQLVESGGGLVQPGGSLRLSCVASGFSLDDYGMTWVRQAPGKGLEWVSSINWSGTHTDYADSVKGRFTISRDNAKNTLFLQMNSLRSEDTAVYYCNQGWKIVPTDRGGHGTQVTVSS |
| 2F4 | EVQLVESGGGLVQPGGSLRLSCVASGFSLDDYGMTWVRQAPGKGLEWVSSINWSGTHTDYADSVKGRFTISRDNAKNTLFLQMNSLRSEDTAVYYCNQGWKIVPTDRRGHGTQVTVSS |
| 2C3 | EVQLVESGGGLVQPGGSLRLSCVASGFSLDDYGMTWVRQAPGKGLEWVSSINWSGTHTDYADSVKGRFTISRDNAKNTLFLQMNSLRSEDTAVYYCNQGWKIVPTDRTGHGTQVTVSS |
| 17E3 | EVQLVESGGGLVQAGGSLRLSCVASKMTFMRYTMGWYRQAPGKQRDLVA SIDSSGGTNYADSVKGRFTISRDNAKNTVYLEMNSLTPEDTAVYYCNQGWKIVPTDRTGHGTQVTVSS |
| 17H3 | EVQLMESGGGLVQPGGSLRLSCVASGFSLDDYGMTWVRQAPGKGLEWVSSINWSGTHTDYADSVKGRFTISRDNAKNTLFLQMNSLRSEDTAVYYCNQGWKIVPTDRGGHGTQVTVSS |
| 17D2 | EVQLVESGGGLVQPGGSLRLSCVASGFSLDDYGMTWVRQAPGKGLEWVSSINWSGTHTDYADSVKGRFTISRDNAKNTLFLQMNSLRSEDTAVYYCNQGWKIVPTDRGSHGTQVTVSS |
| 2F1 | EVQLVESGGGLVQPGGSLRLSCVASGFSLDDYGMTWVRQAPGKELEWISSINWSGTHTDYADSVKGRFTISRDNAKNTLFLQMNSLTPEDTAVYYCNQGWKIVPMDRRGHGTQVTVSS |
| 2E2 | EVQLVESGGGLVQPGGSLRLSCVASGFSLDDYGMTWVRQAPGKGLEWVSSINWSGTHTDYADSVKGRFTISRDNAKNTLFLQMNSLTPEDTAVYYCNQGWKIIPTDRRGHGTQVTVSS |
| 2C2 | EVQLVESGGGLVQPGGSLRLSCVASGFSLDDYAMTWVRQAPGKGLEWVSSINWSGTHTDYADSVKGRFTISRDNARNTLFLQMNSLTPEDTAIYYCNQGWKILPTDRRGHGTQVTVSS |
| 2E3 | EVQLVESGGGLVQPGGSLRLSCVASGFSLDDYGMTWVRQAPGKGLEWVSSINWSGTHTDYADSVKGRFTISRDNAKNTLFLQMNSLSPEDTAVYYCNQGWKILPTNRGSHGTQVTVSS |
| 13B10 | EVQLVESGGGLVQPGGSLRLSCVASGFSLDDYGMTWVRQAPGKGFEWVSSINWSGTHTDYADSVKGRFTISRDNAKNTLFLQMNSLSPEDTAVYYCNQGWKILPTNRGSHGTQVTVSS |
| 2D1 | EVQLVESGGGLVQPGGSLRLSCVASGFSLDDYGMTWVRQAPGKGLEWVSSINWSGTHTDYADSVKGRFTISRDNAKNTLFLQMNSLSPEDTAVYYCNRGWKILPTNRGSHGTQVTVSS |
| 2H3 | EVQLVESGGGLVQPGGSLRLSCVASGFSLDDYGMTWVRQAPGKGLEWVSSINWSGTHTDYADSVKGRFTISRDNAKNTLFLQMNSLTPEDTAVYYCNQGWKIIPTDRRGHGTQVTVSS |
| 2H1 | EVQLVESGGGLVQPGGSLRLSCVASGFSLDDYGMTWVRQAPGKGLEWVSSINWSGTHTDYADSVRGFVISRDNAKNTLFLQMNSLSPEDTAVYYCNQGWKIIPTDRRGHGTQVTVSS |
| 2C1 | EVQLVESGGGLVQPGGSLRLSCVASGFSLDDYGMTWVRQAPGKGLEWVSSINWSGTHTDYTDSVKGRFTISRDNAKNTLFLQMNSLTPEDTAVYYCNQGWKIIPTDRRGHGTQVTVSS |
| 15C5 | EVQLVESGGGLVQPGGSLKLSCVASGFSLDDYGMTWVRQAPGKGLEWVSSINWNVTHTDYAYSVKGRFTISRDNAKNTLFLQMNSLTPEDTAVYYCNQGWKIIPTDRRGHGTQVTVSS |
| 2B3 | EVQLVESGGGLVQPGGSLRLSCVASGFSLDDYGMTWVRQAPGKGLEWVSSINWSGTHTDCADSVKGRFTISRDNAKNTLFLQMNSLTPEDTAVYYCNQGWKIIPTDRRGHGTQVTVSS |
| 29H2 | EVQLVESGGGLVQPGGSLRLSCVASGFSLDDYGMTWVRQAPGKGLEWVSSINWSGTHTDYADSVKGRFTISRDNAKNTLFLQMNNLTPEDTAVYYCHQGWKIIPTDRRGHGTQVTVSS |
| 17E4 | EVQLVESGGGLVQPGGSLRLSCVASGFSLDDYGMTWVRQAPGKGLEWVSSINWSGTHTDYADSVKGRFVISRDNAKNTLFLQMNSLSPEDTAVYYCNQGWKIIPTDRRGHGTQVTVSS |
| 17A2 | EVQLVESGGGLVQPGGSLRLSCVASGFSLDDYAMTWVRQAPGKGLEWVSSINWSGTHTDYADSVKGRFTISRDNAKNTLFLQMNSLSPEDTAVYYCNKGWKVWPTDRGTHGTQVTVSS |
| 15D1 | EVQLVESGGGLVQPGGSLRLSCVASGFSLDDYAMTWVRQAPGKGLEWVSSINWSGTHTDYADSVKGRFTISRDNAKNTLFLQMNSLNPEDTAVYYCNQGWKVWPTDRGTHGTQVTVSS |
| 17B8 | EVQLVESGGGLVQPGGSLRLSCVASGFSLDDYGMTWVRQAPGKGLEWVSSINWSGTHTDYADSVKGRFTISRDNAKNTLFLQMSLTPEDTAVYYCNQGWKILPAERRGHGTQVTVSS |
| 15C11 | EVQLVESGGGLVQPGGSLRLSCVASGFSLDDYGMTWVRQAPGKGLEWVSSINWSGTHTDYADSVKGRFTISRDNAKNTLFLQMNSLTPEDTAVYYCNQGWKILPAERRGHGTPVTVSS |
| 15G8 | EVQLVESGGGLVQPGGSLKLSCVASGFSLDDYGMTWVRQAPGKGLEWVSSINMNGTHTDYAYSVKGRFTISRDNAKNTLFLQMNSLTPENTAVYYCNQGWKILPAERRGHGTQVTVSS |
| 17H4 | EVQLVESGGGLVQPGGSLRLSCVASGFSLINYAMTWVRQAPGKGLEWVSSINWSGTHTDYADSVKGRFTISRDNAKNTLFLHMNNLSPEDTAVYYCGQGWKIHPADRGGHGTQVTVSS |
| 27G8 | EVQLVESGGGLVQPGGSLRLSCVASGFSLDDYGMTWVRQAPGKGLEWVSSINWSGTHTDYADSVKGRFTISRDNAKNTLFLQMNSLTPEDTAVYYCNQGWKILPAERRGHGTQVTVSS |
| 38C6 | EVQLVESGGGLVQPGGSLRLSCVGSGFSLDDYAMTWVRQAPGKGLEWVSSINWSGTHTDYADSVKGRFTISRDNAKNTLFLQMNSLSPEDTAVYYCNQGWKIRPTIPMGHGTQVTVSS |
| 2A4 | EVQLVESGGGLVQPGGSLRLSCAASGFIFDDYAMSWVRQAPGKGLEWVSAINWSGSHRNYADSVKGRFTISRDNAKKTVYLQMNSLQSEDTAVYYCGTGWQSTTKNQGYWGQGTQVTVSS |
| 15G7 | EVQLVESGGGLVQPGGSLRLSCAASGFIFDDYAMSWVRQAPGKGLEWVSAINWSGTHRNYADSVKGRFTISRDNNKKTVYLQMNSLKSEDTAVYYCATGWQSTTKNQGYWGQGTQVTVSS |
| 15B7 | EVQLVESGGGLVQPGGSLKLSCAASGFIFDDYAMSWVRQAPGKGLEWVSAINWSGSHRNYADSVKGRFTISRDNAKKTVYLQMNSLQSEDTAVYYCGTGWQSTTKSQGYWGQGTQVTVSS |
| 5G4 | EVQLVESGGGLVQPGGSLTLSCAGSGFIFDDYAMSWVRQAPGKGLEWVSSINWSGSHRNYADSVKGRFTISRDNAKKTLYLQMNSLKSEDTAVYYCATGWQSTTKNQNYWGQGTQVTVSS |
| 13B2 | EVQLVESGGSLVQPGGSLRLSCAASGFTFDDYAMSWVRQAPGKGLEWISSINWSGTHKDYADSVKGRFTISRNNANNTLYLQMNNLKFEDTAVYYCAKNWRDAGTTWFEKSGSAGQGTQVTVSS |
| 2E5 | EVQLVESGGSLVQPGESLRLSCAASGFTFDDYAMSWVRQAPGKGLEWISSINWSGTHTDYADSVKGRFTISRNNANNTLYLQMNNLKFEDTAVYYCAKNWRDAGTTWFEKSGSAGQGTQVTVSS |
| 15G1 | EVQLVESGGSLVPPGGSLRLSCAASGFTFDDYAMSWVRQAPGKGLEWVSSINWSGTHTDYTDSVKGRFTISRNNANNTLYLQMNSLKSEDTAVYYCAKNWRDAGTTWFEKSGSAGQGTQVTVSS |
| 27B1 | EVQLVESGGSLVQPGGSLRLSCAASGFTFDDYAMSWVRQAPGKGLEWISSINWSGTHTDYADSVKGRFTISRNNANNTLYLQMNNLKFEDTAVYYCAKNWRDAGTTWFEKSGSAGQGTQVTVSS |
| 17E7 | EVQLVESGGSLVQPGGSLRLSCAASGFTFDDYAMSWVRQVPGKGLEWVSSINWSGTHTDYADSVKGRFTISRNNANNTLYLQMNSLKSEDTAVYYCAKNWRDAGTTWFEKSGSAGQGTQVTVSS |
| 17D8 | EVQLVESGGSLVPPGGSLRLSCAVSGFTFDDYAMSWVRQAPGKGLEWVSSINWSGTHTDYTDSVKGRFTISRNNANNMLYLQMNSLKSEDTAVYYCAKNWRDAGTTWFEKSGSAGQGTQVTVSS |
| 5F8 | EVQLVESGGSLVQPGGSLRLSCAASGFTFDDYALSWVRQAPGKGLEWISSINWSGTHTDYADSVKGRFTISRNNANNTLYLQMNNLKFEDTAVYYCAKNWRDAGTTWFEKSGSAGQGTQVTVSS |
| 2D4 | EVQLVESGGSLVQPGGSLRLSCAASGFTFDDYAMTWVRQAPGKGLEWVSSINWSGTHTDYADSVKGRFTISRNNANNTLYLQMNSLKSDDTAVYYCAKNWGDAGTTWFEKSGSAGPGTQVTVSS |
| 13D8 | EVQLVESGGSLVQPGGSLRLSCAASGFTFDDYAMTWVRQASGKGLEWVSSINWSGTHTDYTDSVKGRFTISRNNANNTLYLQMNSLKSEDTAVYYCAKNWGDAGTTWFEKSGSAGQGTQVTVSS |
| 17G8 | EVQLVESGGSLVPPGGSLRLSCAASGFTFDDYAMSWVRQAPGKGLEWVSSINWSGTHTGYTDSVKGRFTISRNNANNTLYLQMNSLKSEDTAVYYCAKNWGDAGTTWFEKSGSAGQGTQVTVSS |
| 2H4 | EVQLVESGGSLVQPGGSLRLSCAASGFTFDDYAMTWVRQAPGKGLEWVSSINWSGTHTDYTDSVKGRFTISRNNANNTLYLQMNSLKSEDTAVYYCAKNWGDAGTTWFEKSGSAGQGTQVTVSS |
| 2F3 | EVQLVESGGSLVQPGGSLRLSCAASGFTFDDYAMTWVRQAPGKGLEWVSSINWSGTHTDYTGSVKGRFTISRNNANNTLYLQMNSLKSDDTAVYYCAKNWGDAGTTWFEKSGSAGPGTQVTVSS |
| 2F5 | EVQLVESGGSLVPPGGSLRLSCAASGFTFDDYAMSWVRQAPGKGLEWVSSINWSGTHTDYTDSVKGRFTISRNNANNTLYLQMNSLKSEDTAVYYCAKNWGDAGTTWFEKSGSAGQGTQVTVSS |
| 30E10 | KVQLVESGGSLVPPGGSLRLSCAASGFTFDDYAMTWVRQAPGKGLEWVSSINWSGTHTDYTDSVKGRFTISRNNANNTLYLQMNSLKSEDTAVYYCAKNWGDAGTTWFEKSGSAGQGTQVTVSS |
| 29H1 | EVQLVESGGSLVPPGGSLRLSCAASGFTFDDYAMSWVRQAPGKGLEWVSSINWSGTHTGYTDSVKGRFTISRNNANNTLYLQMNSLKSEDTAVYYCAKNWGDAGTTWFEKSGSAGQGTQVTVSS |
| 17E2 | EVQLVESGGSLVPPGGSLRLSCAASGFTFDDYGMSWVRQAPGKGLEWVSSINWSGTHTDYTDSVKGRFTISRNNANNTLYLQMNSLKSEDTAVYYCAKNWGDAGTTWFEKSGSAGQGTQVTVSS |
| 2B1 | EVQLVESGGSLVQPGGSLRLSCAASGFTFDDYAMTWVRQAPGKGLEWVSSINWSGTHTDYTDSVKGRFTISRNNANNTLYLQMNSLKSDDTAVYYCAKNWGDAGTTWFEKSGSAGPGTQVTVSS |
| 2A5 | EVQLVESGGGLVQPGGSLRLSCATSGFTFDDYAMTWVRQAPGKGLEWVSSINWSGTHTDYTDSVKGRFTISRNNANNTLYLQMNSLKSEDTAVYYCAKNWGDAGTTWFEKSGSAGQGTQVTVSS |
| 13C12 | EVQLVESGGSLVQPGGSLRLSCATSGFTFDDYAMTWVRQAPGKGLEWVSSINWSGTHTDYTDSVKGRFTISRNNANNTLYLQMNSLKSEDTAVYYCAKNWGDAGTTWFEKSGSAGQGTQVTVSS |
| 17E10 | EVQLVESGGSLVQPGGSLRLSCAASGFTFDDYAMTWVRQAPGKGLEWVSSINWSGTHTDCTDSVKGRFTISRNNANNTLYLQMNSLKSEDTAVYYCAKNWGDAGTTWFEKSGSAGQGTQVTVSS |
| 27D4 | EVQLVESGGSLVQPGGSLRLSCAASGFTFDDYAMTWVRQASGKGLEWVSSINWSGTHTDYADSVKGRFTISRNNANNTLYLQMNSLKSEDTAVYYCAKNWGDAGTTWFEKSGSAGQGTQVTVSS |
| 15F9 | EVQLVESGGSLVQPGGSLRLSCAASGFTFDDYAMTWVRQAPGKGLEWVSSINWSGTHTDYTGSVKGRFTISRNNANNTLYLQMNSLKSDDTAVYYCAKNWGDAGTTWFEKSGSAGQGTQVTVSS |
| 30H9 | EVQLVESGGSLVQPGGSLRLSCAASGFTFDDYAMTWVRQAPGKGLEWVSSINWSGTHTDYTDSVKGRFTISRNNANNTLYLQMNSLKSEDTAVYYCAKNWGDAGTTWFEKSGSAGQGTQVTVSS |
| 39C1 | EVQLVESGGSLVPPGGSLRLSCAASGFTFDDYGMSWVRQAPGKGLEWVSSINWSGTHTDYTDSVKGRFTISRNNANNTLYLQMNSLKSEDTAVYYCAKNWGDAGTTWFEKSGSAGQGTQVTVSS |
| 27G2 | EVQLVESGGSLVQPGGSLRLSCAASGFTFDDYAMTWVRQTPGKGLEWVSSINWSGTHTDYTDSVKGRFTISRNNANNTLYLQMNSLKSDDTAVYYCAKNWGDAGTTWFEKSGSAGQGTQVTVSS |
| 2D3 | EVQLVESGGSLVQPGGSLRLSCAASGFTFDDYAMSWVRQVPGKGLEWVSSINWSGTHTDYADSVKGRFTISRNNANNTLYLQMNSLKSEDTAVYYCAKNWRDAGTTWFEKSGSAGQGTQVTVSS |
| 5F7 | EVQLVESGGGLVQAGGSLRLSCAASGITFSINTMGWYRQAPGKQRELVALISSIGDTYYADSVKGRFTISRDNAKNTVYLQMNSLKPEDTAVYYCKRFRTAAQGTDYWGQGTQVTVSS |
| PBMP118N121_A1_4_OK/ | EVQLVESGGGFVQTGGSPRLSCAASGRSFSEYAAAWFRQSPGKERDLVAGIMWDGRSLFYADSVKGRFTISRDNAKNTLHLQMNSLKPEDTAVYYCAYHKTPYTTLELNRPHAFGSWGQGTQVTVSS |
| 1-127 | |

OT-FAB COMPETING

| | |
|---|---|
| 47D5 | KVQLVESGGGLVQPGGSLRLSCAASGSIFGFNDMAWYRQAPGKQRELVALISRVGVTSSADSVKGRFTISRVNAKDTVYLQMNSLKPEDTAVYYCYMDQRLDGSTLAYWGQGTQVTVSS |

HER2 BINDING

| | |
|---|---|
| 14B11 | EVQLVESGGGLVQAGGSLRLSCAASGSTFSSYGMGWFRQVPGKEREFVATINWSGVTAYADSVKGRFTISRDNAKKTVYLQMNSLKPEDTARYYCGVETYGSGSSLMTEYDYWGQGTQVTVSS |
| 14B10 | EVQLVESGGGLVQAGGSLRLSCAVNSRTFSSYGMGWFRQAPGKEREFVATINWSGVTAYADSIKGRFTISRDNAKETVYLQMNSLKPDDTGVYYCAAETYGSGSSLMSEYDYWGQGTVTVSS |
| 14B4 | EVQLVESGGGLVQAGGSLRLSCAVSSRAFSSYGMGWFRQAPGKDREFVATINWSGVTAYADSIKGRFTISRDNAKETVYLQMNSLKPEDTGVYYCAAETYGSGSSLMSEYDYWGQGTQVTVSS |
| 14C11 | EVQLVESGGGLVQAGGSLRLSCAVNSRTFSSYGMGWFRQAPGKEREFVATINWSGATAYADSIKGRFTISRDNAKETVYLQMNSLKPDDTGVYYCAAETYGSGSSLMSEYDYWGQGTQVTVSS |
| 14B5 | EVQLVESGGGLVQAGGSLRLSCAVSSRAFSSYGMGWFRQAPGKDREFVATINWSGVTAYADSIKGRFTISRDNAKETVYLQMNSLKPDDTGVYYCAAETFGSGSSLMSEYDYWGQGTQVTVSS |
| 14C6 | EVQLVESGGGSVQAGGSLRLSCVASEGTFSSYGMGWFRQAPGKERAFVATINWSGVTAYADSVKGRFTISRDNAKKTVYLQMNSLKPEDTAVYYCATDTYGSGSSLMNEYDYWGQGTQVTVSS |
| 14A4 | EVQLVESGGGSVQAGSSLTLSCVASEGTFSSYGMGWFRQAPGKERAFVATINWSGVNAYADSVKGRFTISRDNAKKTAYLQMNSLKPEDTAVYYCAAETYGSGSSLMNEYDYWGQGTQVTVSS |
| 14B3 | EVQLVESGGGLVQPGGSLTLSCVASEGTFSSYGMGWFRQAPGKERAFVATINWSGVNAYADSVKGRFTISRDNAKKTAYLQMNSLKPEDTAVYYCAAETYGSGSSLMNEYDYWGQGTQVTVSS |
| 14C1 | EVQLVESGGGSVQAGGSLRLSCAASGSTFSSYGMGWFRQAPGKERAFVATINWSGVTAYADSVKGRFTISRDNAKKTVYLQMNSLKPEDTAVYYCATETYGSGSSLMNEYDYWGQGTQVTVSS |
| 14A12 | EVQLVKSGGGLVQAGGSLRLSCAASERTFSSYGMGWFRQAPGKEREFVATINWSGVTAYADSVKGRFTISRDNAKKTVYLQMNSLKPEDTAVYYCAAEPYGSGSSLISEYDYWGHGTQVTVSS |
| 14A2 | EVQLVESGGGLVQAGGSLRLSCAASERTFSSYGMGWFRQAPGKEREFVATINWSGVTAYADSVKGRFTISRDNAKKTVYLQMNSLKPEDTAVYYCAAEPYGSGSSLISEYDYWGHGTQVTVSS |
| 14A1 | EVQLVESGGGSVQAGGSLRLSCAASERTFSSYGMGWFRQAPGKEREFVATINWSGVTAYADSVKGRFTISRDNAKKTVYLQMNSLKPEDTAVYYCAAEPYGSGSSLMSEYDYWGHGTQVTVSS |
| 17C3 | EVQLVESGGGLVQAGGSLRLSCAANGLTFRRYDMGWYRQAPGQQREWVAAISGAGDINYADSVKGRFTMARDNANHTVHLQMNSLKPEDTAVYYCNANWKMLLGVENDYWGQGTQVTVSS |
| 46D3 | KVQLVESGGGLVQAGGSLRLSCAASGRTFTEYSMGWFRQAPGKEREFVATISWNYGYTYYSDSVKGRFTVGRDIAENTVYLQMNTLKSEDTAVYYCAAKIGWLSIRGDEYEYWGQGTQVTVSS |
| 27H5 | EVQLVESGGGLVQAGGSLRLSCAASGFTFDDYGIGWFRQASGKEREGVSCITSSDGSTYYADSVKGRFTISSDNAKNTVYLQMNSLKPED |
| | TAVYYCAALPFVCPSGSYSDYGDEYDYWGQGTQVTVSS |
| 17C2 | EVQLVESGGGLVQPGGSLRLSCAASGFAFSSYAMSWVRQAPGKGLEWVSAVDSGGGRTDYAHSVKGRFTISRDNAKNTLYLQMSSLKPEDTALYYCTKHVSDSDYTEYDYWGQTQVTVSS |
| 17D11 | EVQLVESGGGLVQAGGSLRLSCTASGRTSSTSAMGWFRQAPGKEREFVATISRGGSATYYADSLKGRFTISRDNAKNTLYLQMNSLKP |
| | EDTAVYYCAARRSSLYTSSNVFEYDYWGQGTQVTVSS |
| 15A6 | EVQLVESGGGLVQAGGSLRLSCVTTSRRPASTRTMAWYRQAPGKQRDWVATISSHGLPVYADSVKGRFTVSRDNANNTVYLQMNTLKPEDTAVYYCRDVNADYWGQGTQVTVSS |
| 17B6 | EVQLVESGGGLVQPGGSLRLSCAASRIPFSTRTMAWYRQAPGKQRDWVATIGTSGPPRYADSVKGRFTVSRDNAKNTVYLQMNSLKAEDTAVYYCWDVNADYWGQGTQVTVSS |
| 17C5 | EVQLVESGGGLVQAGGSLRLSCVTSRRPASTRTMAWYRQAPGKQRDWVATISSHGLPVYADSVKGRFTVSRDNANNTVYLQMNTLKPEDTAVYYCRDVNADYWGQGTPVTVSS |
| 15E11 | EVQLVESGGGLVQAGGSLRLSCVASRIPFSSRTMAWYRQAPGKQRDWVATISARGMPAYEDSVKGRFTVSRDNDKNTLYLQMNSLKPEDTAVYYCRDVNADYWGQGTQVTVSS |
| 15C2 | EVQLVESGGGLVQAGGSLRLSCVTSRRPASTRTMAWYRQAQGKQRDWVATISSHGLPVYADSVKGRFTVSRDNANNTVYLQMNTLKPEDTAVYYCRDVNADYWGQGTQVTVSS |
| 2A3 | EVQLVESGGGLVQAGGSLNLSCVASGIPFSTRTMAWYRQAPGKPRDWVA TIRNGAPVYADSVKGRFTVSRDNAKNTLYLQMNSLKPEDTATYLCRDVNGDIWGQGTQVTVSS |
| 27A5 | EVQLVESGGGLVQAGGSLNLSCVASGIPFSTRTMAWYRQPPGNERDWVA TIRSGAPVYADSVKGRFTVSRDNAKNTLYLQMNSLEPEDTATYYCWDVNGDIWGQGTPVTVSS |
| 2C5 | EVQLVESGGGLVQAGGSLNLSCVASGIPFSTRTMAWYRQTPGKSRDWVA TIRSGTPVYADSVKGRFTVSRDNAKNTLYLRMNSLKSEDSATYTCRAVNADIWGQGTQVTVSS |
| 27G5 | EvQLVESGGGLVQPGGSLRLSCVASRIPASIRTMAWYRQTPGNQRDWLATIGSSGTPAYADSVKGRFTVSRDNAKNTVYLQMNSLKPEDTAVYYCRDVNGDYWGQGTQVTVSS |
| 13A9 | EVQLVESGGGLVQAGGSLRLSCVASRIPASIRTMAWYRQAPGKQRDWVATIGTGGTPAYADSFKGRFTVSRDNANHTVYLQMNSLKPEDTAVYYCRDVNGDYWGQGTQVTVSS |
| 29E9 | EVQLVESGGGLVQPGGSLRLSCVASRIPASIRTMAWYRQTPGNQRDWLATIGSSGTPAYADSVKGRFTVSRDNAKNTVYLQMNSLKPEDTAVYYCRDVNGDYWGQGTQVTVSS |
| 15D8 | EVQLVESGGGLVQPGGSLKLSCVASTIPASIRTMAWYRQTPGNQRDWLATIGSSGTPAYADSVKGRFTVSRDNAKNTVYLQMNSLKPEDTAVYYCRDVNGDYWGQGTQVTVSS |
| 15G4 | EVQLVESGGGLVQAGGSLRLSCVASGIPFRSRTMAWYRQAPGKTRDWVATIGTHGTPLYADSVKGRFTVSRDNAKNTLYLQMNSLKPEDTAVYYCWDVNGDYWGQGTQVTVSS |
| 15D12 | EVQLVESGGGLVQAGESLRLSCATSGITFKRYVMGWYRQGPGKQRELVATVNDGGTTSYADSVKGRFAISRDNAKNTAYLQMNSLKAEDTAVYYCNAVWKLPRFVDNDYWGQGTQVTVSS |
| 15E12 | EVQLMESGGGLVQAGGSLRLSCAANGLTFRRYDMGWYRQAPGQQREWVAAISGAGDINYADSVKGRFTMARDNANHTVHLQMNSLKPEDTAVYYCNANWKMLLGVENDYWGQGTQVTVSS |
| 13D7 | EVQLAVESGGGLVQAGGSLRLSCAANGLTFRRYDMGWYRQAPGQQREWVAAISGAGDINYADSVKGRFTMARDNANHTVHLQMNSLKPEDTAVYYCNANWKMLLGVENDYWGQGTQVTVSS |
| 13A8 | EVQLVESGGGLVQPGGSLRLSCAASGLGIAFSRRTMAWYRQAPGKQRDWVATIAGDGSTV YADSMKGRFTISRDNAENTVYLQMNSLKPEDTAVYYCWDVNRDYWGQGTQVTVSS |
| 15A4 | EVQLVESGGGLVQPGGSLRLSCAASGLGIAFSRRTMAWYRQAPGKQRDWVATIAGDGSTV YADSMKGRFTISRDNAKNTVYLQINSLKPEDTAVYYCWDVNRDYWGQGTQVTVSS |
| 17F7 | EVQLVESGGGLVQAGGSLRLSCVASGIAQS IRVMAWYRQPPGKQRDWVGTISSDGTAN YADSVKGRFTISRDNAKKTMYLQMNSLKPDDTAVYYCRDVNRDYWGQGTQVTVSS |
| 15C8 | EVQLVESGGGLVQAGGSLRLSCAASGIAFR IRTMAWYRQAPGKQRDWVATSDSGGTTL YADSVKGRFTVSRDNAENTVYLQMNSLKPEDTAVYYCRDVNRDYWGQGTQVTVSS |
| 17A10 | EVQLVESGGGLVQAGGSLRLSCVASGIPSI RAIAWYRQAPGKQRDWVATSGTGYGAT YDDSVKGRFTLSRDNAKNTVYLQMNSLKPEDTAVYYCRDVNRDYWGQGTQVTVSS |
| 27D3 | EVQLMESGGGLVQPGGSLRLSCAASGLGIAFSRRTMAWYRQAPGKQRDWVATIAGDGSTV YADSMKGRFTISRDNAENTVYLQMNSLKPEDTAVYYCWDVNRDYWGQGTQVTVSS |
| 13B12 | EVQLVESGGGLVQAGGSLRLSCAASGIAFR IRTMAWYRQAPGKQRDWVATIGSDGTTI YADSVKGRFTLSRHNAENTVYLQMNSLKPEDTAVYYCRDVNRDYWGQGTQVTVSS |
| 15B2 | EVQLVESGGGLVQAGGSLRLSCVVSGIPSS IRAMAWYRQAPGRQRDWVATIYSPSGSAVYADSVKGRFTISSDNAKSTIYLQMNSLKPDDTAVYYCRDVNRDYWGQGTQVTVSS |
| 15B11 | EVQLVESGGGSVQAGGSLRLSCVVSGIPSS IRAMAWYRQAPGRQRDWVATIYSRSGGAVYADSVKGRFTISSDNAKNTIYLQMNSLKPDDTAVYYCRDVNRDYWGQGTQVTVSS |
| 13C9 | EVQLVESGGGLVQAGGSLRLSCVASGIPSI HAMAWYRQAPGKQRDWGATTYSRGG TTYNDSAKGRFTISRDNAKKTVYLQMNSLKPEDTAVYYCRDVNRDYWGQGTQVTVSS |
| 17D5 | EVQLVESGGGLVQPGGSLRLSCAASGIIGT IRTMAWYRQAPGKQRDWVA SIGTRGAPVYADSVNGRFTISRDGATNTVFLQMNNLKPEDTAVYYCRDVNRDYWGQGTQVTVSS |
| 27B5 | EVQLVESGGGLVQAGGSLRLPCAASGIAFR IRTMAWYRQAPGKQRDWVA TSDSGGTTLYADSVKGRFTVSRDNAENTVYLQMNSLKPEDTAVYYCRDVNRDYWGQGTQVTVSS |
| 27C7 | EVQLVESGGGLVQAGGSLRLSCAASGIAFR IRTMAWYRQAPGKQRDWVA TSDSGGTTLYADSVKGRFTVSRDNADNTVYLQMNSLKPEDTAVYYCRDVNRDYWGQGTQVTVSS |
| 13D4 | EVQLVESGGGLVQAGCSLRLSCVVSGIPSS IRAMAWYRQAPGRQRDWVA TIYSPSGSAVYADSVKGRFTISSDNAKSTIYLQMNSLEPDDTAVYYCRDVNREYWGQGTQVTVSS |
| 15G5 | EVQLVESGGGLVQAGGSLRLSCVVSGIPST IRAMAWYRQAPGRQRDWVA TIYSPSGSAVYADSVKGRFTISSDNAKKTIYLQMNSLKPDDTAVYYCRDVNREYWGQGTQVTVSS |
| 13C4 | EVQLVESGGGLVQAGGSLRLSCVVSGIPSS IRAMAWYRQAPGRQRDWVA TIYSPSGSAVYADSVKGRFTISSDNAKSTIYLQMNSLKPDDTAVYYCRDVNREYWGQGTQVTVSS |
| 46G1 | EVQLVESGGGLVQAGGSLRLSCAASGRTFSDDAMGWFRQAPGKERECVASLYLNGDYPYYADSVKGRFTISRDNAKNAVILQMNNLKTEDTAVYYCAAKPGWVARDPSQYNYWGQGTQVTVSS |
| 46E4 | EVQLVESGGGLVQAGGSLRLSCAASGRAFKDDAVGWERQAPGKERECVASMYLDGDYPYYADSVKGRFTISRDNAKNAVILQMNNLKTEDTAVYYCAAKPGWVARDPSEYNYWGQGTQVTVSS |
| 17B5 | EVQLVESGGGLVQTGGSLRLSCAASGSTFRTDMMGWYRQAPGKQREFVASITKFGSTNYADSVKGRFTISNDNAKDTVYLQMNSLKSEDTAVYYCRNFNRDLWGQGTQVTVSS |
| 15C9 | EVQLVESGGGLVQAGGSLKLSCVNSGIPSTLRAMAWYRQAPGRQRDWVATSSNTGGTTYDDSVKGRFTISRDNAKNTVYLQMNSLKPEDTGVYYCRDVNRDLWGQGTQVTVSS |
| 13D10 | EVQLVESGGGLQPGGSLRLSCAASSVITLDSNAIGWERQAPGKEREEVSCIASSDGSTYYAESVKGRFTISKDYTRNTVYLQVNSLKPEDTAVYHCATDANPNCGLNVWNSWGQGTQVTVSS |
| 17C6 | EVQLVESGGGLVQAGGSLTLSCAASGSTSSLDIMAWYRQAPEKQRELVASVSGGGNSDYASSVKGRFTISGDTAKSTLYLQMNSLKPEDTAMYYCYGRDYYYMPFWGQGTQVTVSS |
| 15A2 | EVQLVESGGGLAQAGGSLSLSCAASGRFFS TRVMAWYRQTRGKQREFVASMRGSGSTNYADSARGRFAISRDNAKNTVYLQMNSLKPEDTAVYYCRDINEDQWGQGTQVTVSS |
| 17A8 | EVQLVESGGGLVQAGGSLSLSCAASGRFFS TRVMAWYRQTPGKQREFVASMRGSGSTNYADSVRGRFAISRDNAKNMVYLQMNTLKPEDTAVYYCRDINEDQWGQGTQVTVSS |
| 15G10 | EVQLVESGGGLVQAGGSLSLSCAASGRFFS TRVMAWYRQTPGKQREFVASMRGSGSTNYADSARGRFAISRDNAKNTVYLQMNSLKPEDTAVYYCRDINEDQWGQGTQVTVSS |
| 27A3 | EVQLVESGGGLVQAGGSLSLSCVASGRFFS TRVMAWYRQTPGKQREFVASMRGSGSTNYADSVRGRFAISRDNAKNTVYLQMNTLKPEDTAVYYCRDINEDQWGQGTQVTVSS |
| 17H10 | EVQLVESGGGLVQAGGSLSLSCSASGRFFS TRVMAWYRQTPGNQREFVATIHSSGSTIYADSVRGRFAISRDNAKNTVYLQMRSLKPEDTAVYYCRDINADQWGQGTQVTVSS |
| 30D10 | EVQLVESGGGLVQAGGSLTLSCTASETTVR IRTMAWYRQPPGNQREWVATIGSNGFATYPDSVKGRFTISRDNAKNTVYLQMNSLKPEDTAVYYCRDINRDIWGQGSQVTVSS |
| 15H4 | EVQLVESGGGLVQAGGSLTLSCAPSESTVS FNTVAWYRQAPGEQREWVATISRQGMSTYPDSVKGRFTISRDNAKNTVYLQMNNLKPEDTAVYYCRDINHDIWGRGSQVTVSS |
| 17B7 | EVQLVESGGGLVQAGGSLRLSCAASGIISS FRTMAWYRQAPGKQRDWVATIGSDGLANYADSVKGRFTISRDNAKKTVYLQMNSLKPEDTAVYFCRDINRDYWGQGTQVTVSS |
| 15D2 | EVQLVESGGGLVQAGGSLRLSCVVSGVFGP IRAMAWYRQAPGKQRDWVATIGSSGHPVYTDSVKGRFTFSKDGAKNTVYLQMNSLKPEDTAVYYCRDINRDYWGQGTQVTVSS |
| 17G5 | EVQLVESGGGLVQPGGSLRLSCAASGIGIAFSSRTMAWYRQAPGKQRDWVATIGSGGTTNYADSVKGRFTISRDNAKNTVYLQMNSLKPEDTAVYYCRDINRDYWGQGTQVTVSS |
| 15B6 | EVQLVESGGGLVQPGGSLRLSCAASGIIGS FRTMAWYRQAPGNQRDWVATIGSAGLASYADSVRGRFTLSRDNAKKTVYLQMNSLKPEDTAIYYCRDINGDYWGQGTQVTVSS |
| 27F2 | EVQLVESGGGLVQAGGSLRLSCAASGIISSFRTLAWYRQAPGKQRDWVATISSAGGTAYADAVKGRFTISISRDNVEYTVDLQMDSLKPEDTAVYYCRDINGDYWGQGTQVTVSS |
| 17F5 | EVQLVESGGGLVQPGGSLRLSCAASGLGIAFSRRTMAWYRQAPGKQRDWVATIAGDGSTVYADSMKGRFTISRDNAKNTVYLQVNSLKPEDTAVYYCWDTNGDYWGQGTQVTVSS |
| 17B2 | EVQLVESGGGLVQPGGSLRLSCAGSGFTFSNYAMTWVRQAPGKGLEWVSGVGGDGVGSYADSVKGRFTISRDNAKNTLYLQMNSLKPEDTALYYCTKDISTFGWGPFDYWGQGTQVTVSS |
| 27H4 | EVQLVESGGGLVQAGGSLRLSCVASKMTFMRYTMGWYRQAPGKQRDLVASIDASGGTNYADSVKGRFTISRDNAKNTVYLEMNSLKPEDTGVYYCNGRWDIVGAIWWGQGTQVTVSS |
| 13A4 | EVQLVESGGGLVQAGGSLRLSCVASKMTFMRYTMGWYRQAPGKQRDLVASIDSSGGTNYADSVKGRFTISRDNAKNTVYLEMNSLKPEDTGVYYCNGRWDIVGAIWWGQGTQVTVSS |
| 2A1 | EVQLVESGGGLVQAGGSLRLSCVASKITFRRYIMDWYRQAPGKQRELVASINSDGSTGYTDSVKGRFTISRDNTKNTLDLQMNSLKPEDTAVYYCHGRWLEIGAEYWGQGTQVTVSS |
| 15E10 | EVQLVESGGGLVQAGGSLKLSCVASGITFFRYTMGWYRQAPGKERELVAEISSADEPSFADAVKGRFTISRDNAKNTVVLQMNGLKPEDTAVYYCKGSWSYPGLTYWGKGTLVTVSS |
| 27E7 | EVQLVESGGGLVQAGGSLRLSCAASGITFRRYDMGWYRQFPGKERELVATILESEGDTNYVDPVKGRFTISRDNAKNTVYLQMNDLKPEDTAVYYCNGVWRAIGRTYWGQGTQVTVSS |
| 47E5 | EVQLVESGGGLVQAGGSLRLSCAASASIFGFDSMGWYRQAPGNERILVAIISNGGTTSYRDSVKGRFTIARDNAKNTVSLQMNSLKPEDTAVYYCNLDRRSYNGRQYWGQGTQVTVSS |
| 2G4 | EVQLVESGGGLVQAGGSLRLSCAASGNIFSHNAMGWYRQAPGKQRELVTYITINGIANYVDSVKGRFTISRDNTKNTMYLQMVSLKPEDTAVYYCNVGGREYSGVYYYREYWGQGTQVTVSS |
| 14D4 | EVQLVESGGGLVQAGDSLRLSCAASGRALDTYVMGWFRQAPGDGREFVAHIFRSGITSYASSVKGRFTISRDNAKNTVYLQMASLKPEDTAAYYCAARPSDTTWSESSASWGQGTQVTVSS |
| 17A5 | EVQLVESGGGLVQPGGSLRLSCAASGFTFDDYSMSWVRQATGKGLEWVSGISWNGGSTNYADSVKGRFTISRDNVKNTLYLQMNSLKSEDTAVYYCAKDLGNSGRGPYTNWGQGTQVTVSS |
| 15D10 | EVQLVESGGGLVQPGGSLKLSCAASGFTFSSYRMYWVRQAPGKGLEWVSAIKPDGSITYYADSVKGRFTISRDNAKNTVYLQMNSLKPEDTAVYYCATDCGVPGFGWTFSSWGQGTQVTVSS |
| 13C2 | EVQLVESGGGLVQAGGSLRLSCAASGSTFSINRMAWYRQSPGKQRELVAAVDNDDNTEYSDSVAGRFTISRDNAKNAVHLQMNSLRLEDTAVYYCNAKQLPYLQNFWGQGTQVTVSS |
| 17G11 | EVQLVESGGGLVQAGGSLRLSCAASGSTFSINRWGWYRQAPGKQRELVAAIDDGGNTEYSDFVNGRFTISRDNPETAVHLQMNSLKLEDTAVYYCNAKQLPYLQNFWGQGTQVTVSS |
| 17A3 | EVQLVESGGGLVQAGGSLSLSCAASATLHRFDNNWYRQAPGKQRELVATIAHDGSTNYANSVKGRFTISRDNARDTLFLQMHALQPEDTAVYMCNLHRWGLNYWGQGTQVTVSS |
| 27B7 | EVQLVESGGGLVQPGGSLRLSCAASGFTFSSYAMSWVRQAPGKGLEWVSAISSGGGSITTYADSVKGRFTISRDNAKNTLYLQMSSLKPEDTALYYCAKARSSSSYYDFGSWGQGTQVTVSS |
| 17A6 | EVQLVESGGGLVQPGGSLRLSCAASGFTFSSYAMSWVRQAPGKGLEWVSAISSGGGSITTYADSVKGRFTISTDNAKNTLYLQMSSLKPEDTALYYCAKARSSSSYYDFGSWGQGTQVTVSS |
| 17D7 | EVQLVESGGGLVQPGGSLRLSCAASGFTLDYCAIGWFRQAPGKEREGVSCISSSDGSTYYADSVKGRFTISRDNAKNTVYLQMNSLKPEDTAVYYCATDRGSGTCYADFGSWGQGTQVTVSS |
| 46D4 | EVQLVESGGGLVQPGGSLRLSCAASGFIFDDYAMSWVRQAPGKGLEWVSSINWSGTHTDYAEDMKGRFTISRDNAKKTLYLQMNSLQSEDTAVYYCAKGWGPAVTSIPVATLGTQVTVSS |
| 27B3 | EVQLVESGGGLVQAGGSLTLSCTASETTV RIRTMAWYRQPPGNQREWVATIGSNGFATYPDSVKGRFTISRDNAKNTVYLQMNSLKPEDTAVYYCRDINRDIWGQGSQVTVSS |
| 27E5 | EVQLVESGGGLVQAGGSLTLSCTASETTV RIRTMAWYRQPPGNQREWVATIGSNGFATYPDSVKGRFTISRDNAKNTVYLQMNSLKPEDTAVYYCRDINRDIWGQGSQVTVSS |
| 27D6 | EVQLVEGGGGLVQAGGSLTLSCTASETTV RIRTMAWYRQPPGNQREWVATIGSNGFATYPDSVKGRFTISRDNAKNTVYLQMNSLKPEDTAVYYCRDINRDIWGQGSQVTVSS |
| 30D10 | EVQLVESGGGLVQAGGSLTLSCTASETTV RIRTMAWYRQPPGNQREWVATIGSNGFATYPDSVKGRFTISRDNAKNTVYLQMNSLKPEDTAVYYCRDINRDIWGQGSQVTVSS |
| 47G11 | EVQLVESGGGLVQPGGSLRLSCAASGRIFYPMGWFRQAPGKEREFVAAIGSGDIITYYADSVKGRFTISRDNAKNTVYLQMNSLKPEDTAVYYCASSRDYSRSRDPTSYDRWGQGTQVTVSS |
| 27C3 | EVQLVESGGGLVQGGSLRLSCAASGFTFDDYATSWVRQAPGKGPEWVSAINSGGGSTYYADSVKGRFTISRDNAKNTLYLQMNSLKPEDTAVYYCARPRGSSLYLLEYDYWGQGTQVTVSS |

TABLE C-2
k_{off} rate of different Nanobodies as measured in Biacore

| ID | k_{off} (s⁻¹) |
|---|---|
| 2A4 | 2.05E−03 |
| 2A5 | 1.42E−03 |
| 2A6 | 1.65E−03 |
| 2B1 | 1.55E−03 |
| 2C4 | 1.26E−03 |
| 2D2 | 1.61E−03 |
| 2D4 | 1.65E−03 |
| 2F2 | 1.65E−03 |
| 2F3 | 1.53E−03 |
| 2F5 | 1.57E−03 |
| 2G5 | 1.56E−03 |
| 2H4 | 1.61E−03 |
| 2B2 | 1.19E−03 |
| 2B3 | 1.25E−03 |
| 2B4 | 2.77E−03 |
| 2B5 | 1.15E−03 |
| 2C1 | 1.18E−03 |
| 2C2 | 4.12E−03 |
| 2C3 | 1.11E−03 |
| 2D1 | 1.27E−03 |
| 2D5 | 1.20E−03 |
| 2F1 | 1.77E−03 |
| 2F4 | 1.07E−03 |
| 2G1 | 1.23E−03 |
| 2G2 | 1.30E−03 |
| 2G3 | 1.20E−03 |
| 2H3 | 1.09E−03 |
| 2H2 | 1.18E−03 |
| 2H3 | 1.15E−03 |
| 2H5 | 1.21E−03 |

TABLE C-3
Overview of k_{d}/k_{off}-, kₐ-, and K_{d}-values for binding
of Nanobodies 2D3, 5F7 and 47D5 to HER2.

| Nanobody ID | k_{off} (s⁻¹) | Kₒₙ (1/Ms) | K_{D} (nM) |
|---|---|---|---|
| 2D3 | 1.48E−03 | 1.36E+06 | 1.09 |
| Dummy-2D3 | 1.13E−03 | 1.16E+06 | 1.77 |
| 5F7 | 3.02E−04 | 1.02E+06 | 0.29 |
| 47D5 | 8.62E−04 | 3.86E+05 | 2.23 |
| Dummy-47D5 | 8.69E−04 | 2.71E+05 | 3.21 |

Fusion of a dummy Nanobody at the N-terminal end of the Nanobodies 2D3 and 47D5 does not significantly impact on the binding characteristics of 2D3 or 47D5 respectively.

TABLE C-4
Off-rate analysis of HER2-ECD on 2D3, 47D5
and 2D3-35GS-47D5 coated sensor chips

| Analyte | Protein on sensor chip | k_{off} (1/s) |
|---|---|---|
| 100 nM Her2 BCD | 2D3-47D5 | 8.07E−5 |
| 100 nM Her2 BCD | 2D3 | 2.10E−3 |
| 100 nM Her2 ECD | 5F7 | 2.56E−3 |
| 1000 nM Her2 ECD | 2D3-47D5 | 5.45E−5 |
| 1000 nM Her2 BCD | 2D3 | 1.51E−3 |
| 1000 nM Her2 ECD | 5F7 | 1.31E−3 |

TABLE C-5

Oligonucleotide primers used for generation of Omnitarg
light chain V_{L} + C_{L} by overlap extension

| | SEQ ID | | SEQ ID |
|---|---|---|---|
| For-sequences | NO | Rev-sequences | NO |
| >For_LCrescuepAX51 | 2271 | >Rev_LC1pAX51 | 2283 |
| Tgattacgccaagct | | TAATAACAATCCAGCGGCTGCCGTAG | |
| | | GCAATAGGTATTTCATGTTGAAAATCT | |
| >For_LC1pAX51 | 2272 | >Rev_LC2_OT | 2284 |
| Tgattacgccaagcttgcatgca | | ATCGCCGACGGACGCGCTCAGGCTAC | |
| aattctatttcaaggagattttc | | TCGGAGATTGCGTCATCTGGATGTCG | |
| aacatga | | GC | |
| >For_LC2pAX51_OT | 2273 | >Rev_LC3_OT | 2285 |
| gctggattgttattactcgcggc | | CCGGCTTCTGTTGATACCAAGCAACC | |
| ccagccggccatggccGACATCC | | CCGATAGATACGTCCTGACTTGCT | |
| AGATGACG | | | |
| >For_LC3_OT | 2274 | >Rev_LC4_OT | 2286 |
| GCGTCCGTCGGCGATCGCGTTAC | | CCGCTGAAACGGGAAGGCACACCGGT | |
| CATCACATGCAAAGCAACTCAGG | | GTAACGATATGATGCGGAGTAAAT | |
| ACGT | | | |
| >For_LC4_OT | 2275 | >Rev_LC5_OT | 2287 |
| ATCAACAGAAGCCGGGCAAGGCT | | ATAGTAGGTGGCGAAGTCCTCTGGCT | |
| CCGAAATTGCTCATTTACTCCGC | | GCAGGCTAGAGATAGTCAGGGTAA | |
| ATCA | | | |
| >For_LC5_OT | 2276 | >Rev_LC6_OT | 2288 |
| TTCCCGTTTCAGCGGAAGCGGCT | | TACCGTACGTTTAATTTCCACTTTCG | |
| CGGGTACTGATTTTACCCTGACT | | TACCCTGGCCAAAGGTATACGGGT | |
| ATCT | | | |
| <For_LC6_OT | 2277 | >Rev_LCrescue_VL_OT | 2289 |
| TTCGCCACCTACTATTGTCAGCA | | TCGGAAGGCGGAAAG | |
| ATACTATATTTACCCGTATACCT | | | |
| TTGG | | | |
| >For_LC7_OT | 2278 | >Rev_LC7 | 2290 |
| ATTAAACGTACGGTAGCTGCCCC | | ATACGACGCTGGCCGTACCACTTTTC | |
| TAGCGTGTTTATCTTTCCGCCTT | | AGCTGCTCGTCGGAAGGCGGAAAG | |
| CCGA | | | |
| >For_LC8 | 2279 | >Rev_LC8 | 2291 |
| CGGCCAGCGTCGTATGTTTACTG | | CCGGACTGCAGTGCATTATCCACTTT | |
| AATAACTTCTATCCGCGCGAAGC | | CCATTGGACTTTAGCTTCGCGCGG | |
| TAAA | | | |
| >For_LC9 | 2280 | >Rev_LC9 | 2292 |
| TGCACTGCAGTCCGGCAATTCTC | | GGTCAGGGTAGAGCTCAGTGAGTAAG | |
| AAGAATCCGTGACGGAACAAGAT | | TGCTATCTTTGCTATCTTGTTCCG | |
| AGCA | | | |
| >For_LC10 | 2281 | >Rev_LC10 | 2293 |
| AGCTCTACCCTGACCTTGTCAAA | | GAAAGTCCCTGATGGGTCACTTCACA | |
| GGCAGATTATGAAAAACACAAAG | | GGCGTAAACTTTGTGTTTT | |
| TTTA | | | |
| >For_LC11 | 2282 | >Rev_LC11 | 2294 |
| CCATCAGGGACTTTCGAGTCCGG | | aaatagaattggcgcgccttattaGC | |
| TTACAAAGTCTTTTAACCGCGG | | ACTCACCGCGGTTAAAAGAC | |
| | | >Rev_LCrescue | 2295 |
| | | aaatagaattggcgc | |

TABLE C-6

Oligonucleotide primers used for generation of Omnitarg
heavy chain V_{H} + CH₁ by overlap extension

| | SEQ ID | | SEQ ID |
|---|---|---|---|
| For | NO | Rev | NO |
| >For_HCrescue | 2296 | >Rev_HC1 | 2309 |
| gtgctaataaggcgc | | AAAGGTACCACTAAAGGRATTGCGAA | |
| | | TAATAATTTTTTCACTATGACTGT | |
| >For_HC1 | 2297 | >Rev_HC2_OT | 2310 |
| gtgctaataaggcgcgccaattctat | | ACGCAGAGAACCGCCTGGCTGCACCA | |
| ttcaaggagacagtcatagtgaaa | | GCCCACCTCCGCTTTCCACCAGCT | |
| >For_HC2_OT | 2298 | >Rev_HC3_OT | 2311 |
| tttagtggtacctttctattctcact | | TTTCACGTTCACTGATTATACCATGG | |
| ccGAGGTTCAGCTGGTGGAAAGCG | | ATTGGGTTCGCCAGGCGCCGGGTA | |
| >For_HC3_OT | 2299 | >Rev_HC4_OT | 2312 |
| GGCGGTTCTCTGCGTCTGAGCTGCGC | | CCCTTAAAACGTTGGTTGTAAATTGA | |
| TGCCTCCGGTTTCACGTTCACTGA | | GCCACCAGAGTTAGGGTTTACGTC | |
| >For_HC4_OT | 2300 | >Rev_HC5_OT | 2313 |
| GCCAGGCGCCGGGTAAAGGCCTGAA | | TTCTGCACCCAGCGAATTCATCTGTA | |
| TGGGTGGCCGACGTAAACCCTAAC | | AATAGAGTGTGTTTTTAGAGCGAT | |
| >For_HC5_OT | 2301 | >Rev_HC6_OT | 2314 |
| CCAACGTTTTAAGGGTCGTTTCACCC | | TGCCTTGGCCCCAATAGTCAAAGTAA | |
| TGAGCGTAGATCGCTCTAAAAACA | | AAGGACGGGCCCAGATTGCGTGCA | |
| >For_HC6_OT | 2302 | >Rev_HC7 | 2315 |
| TCGCTGCGTGCAGAAGACACCGCTGT | | GATTTCGAGCTTGGGGCCAGCGGAAA | |
| TTATTACTGTGCACGCAATCTGGG | | CACTGACGGACCTTTAGTGCTTGC | |
| >For_HC7_OT | 2303 | >Rev_HCrescue_VH_OT | 2316 |
| ATTGGGGCCAAGGCACGTTGGTCACC | | GATTTCGAGCTTGGG | |
| GTGAGTAGCGCAAGCACTAAAGGT | | | |
| >Rev_HC7_OT_PCR | 2304 | >Rev_HC8 | 2317 |
| ACCTTTAGTGCTTGCGCTACTCACGG | | GGAGACAGTGACCGGTTCCGGGAAGT | |
| TGACCAACGTGCCTTGGCCCCAAT | | AATCTTTCACCAGACAGCCCAGCG | |
| >For_HC8 | 2305 | >Rev_HC9 | 2318 |
| CCCAAGCTCGAAATCCACGTCCGGTG | | TATACAAGCCGCTAGACTGCAAAACC | |
| GCACCGCCGCGCTGGGCTGTCTGG | | GCAGGGAAAGTATGTACACCCGAG | |
| >For_HC9 | 2306 | >Rev_HC10 | 2319 |
| CCGGTCACTGTCTCCTGGAACTCGGG | | TGGTTCACATTGCAAATATACGTCTG | |
| TGCACTTACCTCGGGTGTACATAC | | GGTGCCCAGAGAGCTTGAAGGCAC | |
| >For_HC10 | 2307 | >Rev_HC11 | 2320 |
| CTAGCGGCTTGTATAGCCTGTCAAGC | | TTTTTGTTCTGCGGCCGCACAGCTCT | |
| GTTGTGACCGTGCCTTCAAGCTCT | | TCGGTTCCACTTTCTTATCCA | |
| >For_HC11 | 2308 | >Rev_HCrescue | 2321 |
| TTGCAATGTGAACCACAAACCGAGTA | | TTTTTGTTCTGCGGC | |
| ACACCAAAGTGGATAAGAAAGTGG | | | |

The application's sequence listing, which the Patent Office published only in electronic form, follows.

SEQUENCE LISTING (2321 sequences)

SEQ ID NO: 1 - protein, 30 aa, Artificial
  Framework sequence
EVQLVESGGGLVHPGGSLRLSCVGSGFSLD

SEQ ID NO: 2 - protein, 30 aa, Artificial
  Framework sequence
EVQLVESGGGLVQPGGSLRLSCVGSGFSLD

SEQ ID NO: 3 - protein, 30 aa, Artificial
  Framework sequence
EVQLVESGGGLVQPGGSLRLSCVASGFSLD

SEQ ID NO: 4 - protein, 30 aa, Artificial; identical to SEQ ID NO: 3
  Framework sequence

SEQ ID NO: 5 - protein, 30 aa, Artificial; identical to SEQ ID NO: 3
  Framework sequence

SEQ ID NO: 6 - protein, 30 aa, Artificial; identical to SEQ ID NO: 3
  Framework sequence

SEQ ID NO: 7 - protein, 30 aa, Artificial; identical to SEQ ID NO: 3
  Framework sequence

SEQ ID NO: 8 - protein, 30 aa, Artificial
  Framework sequence
EVQLVESGGGLVQAGGSLRLSCVASKMTFM

SEQ ID NO: 9 - protein, 30 aa, Artificial
  Framework sequence
EVQLMESGGGLVQPGGSLRLSCVASGFSLD

SEQ ID NO: 10 - protein, 30 aa, Artificial; identical to SEQ ID NO: 3
  Framework sequence

SEQ ID NO: 11 - protein, 30 aa, Artificial; identical to SEQ ID NO: 3
  Framework sequence

SEQ ID NO: 12 - protein, 30 aa, Artificial; identical to SEQ ID NO: 3
  Framework sequence

SEQ ID NO: 13 - protein, 30 aa, Artificial; identical to SEQ ID NO: 3
  Framework sequence

SEQ ID NO: 14 - protein, 30 aa, Artificial; identical to SEQ ID NO: 3
  Framework sequence

SEQ ID NO: 15 - protein, 30 aa, Artificial; identical to SEQ ID NO: 3
  Framework sequence

SEQ ID NO: 16 - protein, 30 aa, Artificial; identical to SEQ ID NO: 3
  Framework sequence

SEQ ID NO: 17 - protein, 30 aa, Artificial; identical to SEQ ID NO: 3
  Framework sequence

SEQ ID NO: 18 - protein, 30 aa, Artificial; identical to SEQ ID NO: 3
  Framework sequence

SEQ ID NO: 19 - protein, 30 aa, Artificial; identical to SEQ ID NO: 3
  Framework sequence

SEQ ID NO: 20 - protein, 30 aa, Artificial
  Framework sequence
EVQLVESGGGLVQPGGSLKLSCVASGFSLD

SEQ ID NO: 21 - protein, 30 aa, Artificial; identical to SEQ ID NO: 3
  Framework sequence

SEQ ID NO: 22 - protein, 30 aa, Artificial; identical to SEQ ID NO: 3
  Framework sequence

SEQ ID NO: 23 - protein, 30 aa, Artificial; identical to SEQ ID NO: 3
  Framework sequence

SEQ ID NO: 24 - protein, 30 aa, Artificial; identical to SEQ ID NO: 3
  Framework sequence

SEQ ID NO: 25 - protein, 30 aa, Artificial; identical to SEQ ID NO: 3
  Framework sequence

SEQ ID NO: 26 - protein, 30 aa, Artificial; identical to SEQ ID NO: 3
  Framework sequence

SEQ ID NO: 27 - protein, 30 aa, Artificial; identical to SEQ ID NO: 3
  Framework sequence

SEQ ID NO: 28 - protein, 30 aa, Artificial; identical to SEQ ID NO: 20
  Framework sequence

SEQ ID NO: 29 - protein, 30 aa, Artificial
  Framework sequence
EVQLVESGGGLVQPGGSLRLSCVASGFSLI

SEQ ID NO: 30 - protein, 30 aa, Artificial; identical to SEQ ID NO: 3
  Framework sequence

SEQ ID NO: 31 - protein, 30 aa, Artificial; identical to SEQ ID NO: 2
  Framework sequence

SEQ ID NO: 32 - protein, 30 aa, Artificial
  Framework sequence
EVQLVESGGGLVQPGGSLRLSCAASGFIFD

SEQ ID NO: 33 - protein, 30 aa, Artificial; identical to SEQ ID NO: 32
  Framework sequence

SEQ ID NO: 34 - protein, 30 aa, Artificial
  Framework sequence
EVQLVESGGGLVQPGGSLKLSCAASGFIFD

SEQ ID NO: 35 - protein, 30 aa, Artificial
  Framework sequence
EVQLVESGGGLVQPGGSLTLSCAGSGFIFD

SEQ ID NO: 36 - protein, 30 aa, Artificial
  Framework sequence
EVQLVESGGSLVQPGGSLRLSCAASGFTFD

SEQ ID NO: 37 - protein, 30 aa, Artificial
  Framework sequence
EVQLVESGGSLVQPGESLRLSCAASGFTFD

SEQ ID NO: 38 - protein, 30 aa, Artificial
  Framework sequence
EVQLVESGGSLVPPGGSLRLSCAASGFTFD

SEQ ID NO: 39 - protein, 30 aa, Artificial; identical to SEQ ID NO: 36
  Framework sequence

SEQ ID NO: 40 - protein, 30 aa, Artificial; identical to SEQ ID NO: 36
  Framework sequence

SEQ ID NO: 41 - protein, 30 aa, Artificial
  Framework sequence
EVQLVESGGSLVPPGGSLRLSCAVSGFTFD

SEQ ID NO: 42 - protein, 30 aa, Artificial; identical to SEQ ID NO: 36
  Framework sequence

SEQ ID NO: 43 - protein, 30 aa, Artificial; identical to SEQ ID NO: 36
  Framework sequence

SEQ ID NO: 44 - protein, 30 aa, Artificial; identical to SEQ ID NO: 36
  Framework sequence

SEQ ID NO: 45 - protein, 30 aa, Artificial; identical to SEQ ID NO: 38
  Framework sequence

SEQ ID NO: 46 - protein, 30 aa, Artificial; identical to SEQ ID NO: 36
  Framework sequence

SEQ ID NO: 47 - protein, 30 aa, Artificial; identical to SEQ ID NO: 36
  Framework sequence

SEQ ID NO: 48 - protein, 30 aa, Artificial; identical to SEQ ID NO: 38
  Framework sequence

SEQ ID NO: 49 - protein, 30 aa, Artificial
  Framework sequence
KVQLVESGGSLVPPGGSLRLSCAASGFTFD

SEQ ID NO: 50 - protein, 30 aa, Artificial; identical to SEQ ID NO: 38
  Framework sequence

SEQ ID NO: 51 - protein, 30 aa, Artificial; identical to SEQ ID NO: 38
  Framework sequence

SEQ ID NO: 52 - protein, 30 aa, Artificial; identical to SEQ ID NO: 36
  Framework sequence

SEQ ID NO: 53 - protein, 30 aa, Artificial
  Framework sequence
EVQLVESGGGLVQPGGSLRLSCATSGFTFD

SEQ ID NO: 54 - protein, 30 aa, Artificial
  Framework sequence
EVQLVESGGSLVQPGGSLRLSCATSGFTFD

SEQ ID NO: 55 - protein, 30 aa, Artificial; identical to SEQ ID NO: 36
  Framework sequence

SEQ ID NO: 56 - protein, 30 aa, Artificial; identical to SEQ ID NO: 36
  Framework sequence

SEQ ID NO: 57 - protein, 30 aa, Artificial; identical to SEQ ID NO: 36
  Framework sequence

SEQ ID NO: 58 - protein, 30 aa, Artificial; identical to SEQ ID NO: 36
  Framework sequence

SEQ ID NO: 59 - protein, 30 aa, Artificial; identical to SEQ ID NO: 38
  Framework sequence

SEQ ID NO: 60 - protein, 30 aa, Artificial; identical to SEQ ID NO: 36
  Framework sequence

SEQ ID NO: 61 - protein, 30 aa, Artificial; identical to SEQ ID NO: 36
  Framework sequence

SEQ ID NO: 62 - protein, 30 aa, Artificial
  Framework sequence
EVQLVESGGGLVQAGGSLRLSCAASGITFS

SEQ ID NO: 63 - protein, 30 aa, Artificial
  Framework sequence
EVQLVESGGGFVQTGGSPRLSCAASGRSFS

SEQ ID NO: 64 - protein, 30 aa, Artificial
  Framework sequence
KVQLVESGGGLVQPGGSLRLSCAASGSIFG

SEQ ID NO: 65 - protein, 30 aa, Artificial
  Framework sequence
EVQLVESGGGLVQAGGSLRLSCAASGSTFS

SEQ ID NO: 66 - protein, 30 aa, Artificial
  Framework sequence
EVQLVESGGGLVQAGGSLRLSCAVNSRTFS

SEQ ID NO: 67 - protein, 30 aa, Artificial
  Framework sequence
EVQLVESGGGLVQAGGSLRLSCAVSSRAFS

SEQ ID NO: 68 - protein, 30 aa, Artificial; identical to SEQ ID NO: 66
  Framework sequence

SEQ ID NO: 69 - protein, 30 aa, Artificial; identical to SEQ ID NO: 67
  Framework sequence

SEQ ID NO: 70 - protein, 30 aa, Artificial
  Framework sequence
EVQLVESGGGSVQAGGSLRLSCVASEGTFS

SEQ ID NO: 71 - protein, 30 aa, Artificial
  Framework sequence
EVQLVESGGGSVQAGSSLTLSCVASEGTFS

SEQ ID NO: 72 - protein, 30 aa, Artificial
  Framework sequence
EVQLVESGGGLVQPGGSLTLSCVASEGTFS

SEQ ID NO: 73 - protein, 30 aa, Artificial
  Framework sequence
EVQLVESGGGSVQAGGSLRLSCAASGSTFS

SEQ ID NO: 74 - protein, 30 aa, Artificial
  Framework sequence
EVQLVKSGGGLVQAGGSLRLSCAASERTFS

SEQ ID NO: 75 - protein, 30 aa, Artificial
  Framework sequence
EVQLVESGGGLVQAGGSLRLSCAASERTFS

SEQ ID NO: 76 - protein, 30 aa, Artificial
  Framework sequence
EVQLVESGGGSVQAGGSLRLSCAASERTFS

SEQ ID NO: 77 - protein, 30 aa, Artificial
  Framework sequence
EVQLVESGGGLVQAGGSLRLSCAANGLTFR

SEQ ID NO: 78 - protein, 30 aa, Artificial
  Framework sequence
KVQLVESGGGLVQAGGSLRLSCAASGRTFT

SEQ ID NO: 79 - protein, 30 aa, Artificial
  Framework sequence
EVQLVESGGGLVQAGGSLRLSCAASGFTFD

SEQ ID NO: 80 - protein, 30 aa, Artificial
  Framework sequence
EVQLVESGGGLVQPGGSLRLSCAASGFAFS

SEQ ID NO: 81 - protein, 30 aa, Artificial
  Framework sequence
EVQLVESGGGLVQAGGSLRLSCTASGRTSS

SEQ ID NO: 82 - protein, 30 aa, Artificial
  Framework sequence
EVQLVESGGGLVQAGGSLRLSCVTSRRPAS

SEQ ID NO: 83 - protein, 30 aa, Artificial
  Framework sequence
EVQLVESGGGLVQPGGSLRLSCAASRIPFS

SEQ ID NO: 84 - protein, 30 aa, Artificial; identical to SEQ ID NO: 82
  Framework sequence

SEQ ID NO: 85 - protein, 30 aa, Artificial
  Framework sequence
EVQLVESGGGLVQAGGSLRLSCVASRIPFS

SEQ ID NO: 86 - protein, 30 aa, Artificial; identical to SEQ ID NO: 82
  Framework sequence

SEQ ID NO: 87 - protein, 30 aa, Artificial
  Framework sequence
EVQLVESGGGLVQAGGSLNLSCVASGIPFS

SEQ ID NO: 88 - protein, 30 aa, Artificial; identical to SEQ ID NO: 87
  Framework sequence

SEQ ID NO: 89 - protein, 30 aa, Artificial; identical to SEQ ID NO: 87
  Framework sequence

SEQ ID NO: 90 - protein, 30 aa, Artificial
  Framework sequence
EVQLVESGGGLVQPGGSLRLSCVASRIPAS

SEQ ID NO: 91 - protein, 30 aa, Artificial
  Framework sequence
EVQLVESGGGLVQAGGSLRLSCVASRIPAS

SEQ ID NO: 92 - protein, 30 aa, Artificial; identical to SEQ ID NO: 90
  Framework sequence

SEQ ID NO: 93 - protein, 30 aa, Artificial
  Framework sequence
EVQLVESGGGLVQPGGSLKLSCVASTIPAS

SEQ ID NO: 94 - protein, 30 aa, Artificial
  Framework sequence
EVQLVESGGGLVQAGGSLRLSCVASGIPFR

SEQ ID NO: 95 - protein, 30 aa, Artificial
  Framework sequence
EVQLVESGGGLVQAGESLRLSCATSGITFK

SEQ ID NO: 96 - protein, 30 aa, Artificial
  Framework sequence
EVQLMESGGGLVQAGGSLRLSCAANGLTFR

SEQ ID NO: 97 - protein, 30 aa, Artificial; identical to SEQ ID NO: 77
  Framework sequence

SEQ ID NO: 98 - protein, 30 aa, Artificial
  Framework sequence
EVQLVESGGGLVQPGGSLRLSCAASGLGIA

SEQ ID NO: 99 - protein, 30 aa, Artificial; identical to SEQ ID NO: 98
  Framework sequence

SEQ ID NO: 100 - protein, 30 aa, Artificial
  Framework sequence
EVQLVESGGGLVQAGGSLRLSCVASGIAQS

SEQ ID NO: 101 - protein, 30 aa, Artificial
  Framework sequence
EVQLVESGGGLVQAGGSLRLSCAASGIAFR

SEQ ID NO: 102 - protein, 30 aa, Artificial
  Framework sequence
EVQLVESGGGLVQAGGSLRLSCVASGIPSI

SEQ ID NO: 103 - protein, 30 aa, Artificial
  Framework sequence
EVQLMESGGGLVQPGGSLRLSCAASGLGIA

SEQ ID NO: 104 - protein, 30 aa, Artificial; identical to SEQ ID NO: 101
  Framework sequence

SEQ ID NO: 105 - protein, 30 aa, Artificial
  Framework sequence
EVQLVESGGGLVQAGGSLRLSCVVSGIPSS

SEQ ID NO: 106 - protein, 30 aa, Artificial
  Framework sequence
EVQLVESGGGSVQAGGSLRLSCVVSGIPSS

SEQ ID NO: 107 - protein, 30 aa, Artificial; identical to SEQ ID NO: 102
  Framework sequence

SEQ ID NO: 108 - protein, 30 aa, Artificial
  Framework sequence
EVQLVESGGGLVQPGGSLRLSCAASGIIGT

SEQ ID NO: 109 - protein, 30 aa, Artificial
  Framework sequence
EVQLVESGGGLVQAGGSLRLPCAASGIAFR

SEQ ID NO: 110 - protein, 30 aa, Artificial; identical to SEQ ID NO: 101
  Framework sequence

SEQ ID NO: 111 - protein, 30 aa, Artificial; identical to SEQ ID NO: 105
  Framework sequence

SEQ ID NO: 112 - protein, 30 aa, Artificial
  Framework sequence
EVQLVESGGGLVQAGGSLRLSCVVSGIPST

SEQ ID NO: 113 - protein, 30 aa, Artificial; identical to SEQ ID NO: 105
  Framework sequence

SEQ ID NO: 114 - protein, 30 aa, Artificial
  Framework sequence
EVQLVESGGGLVQAGGSLRLSCAASGRTFS

SEQ ID NO: 115 - protein, 30 aa, Artificial
  Framework sequence
EVQLVESGGGLVQAGGSLRLSCAASGRAFK

SEQ ID NO: 116 - protein, 30 aa, Artificial
  Framework sequence
EVQLVESGGGLVQTGGSLRLSCAASGSTFR

SEQ ID NO: 117 - protein, 30 aa, Artificial
  Framework sequence
EVQLVESGGGLVQAGGSLKLSCVNSGIPST

SEQ ID NO: 118 - protein, 30 aa, Artificial
  Framework sequence
EVQLVESGGGLVQPGGSLRLSCAASSVITL

SEQ ID NO: 119 - protein, 30 aa, Artificial
  Framework sequence
EVQLVESGGGLVQAGGSLTLSCAASGSTSS

SEQ ID NO: 120 - protein, 30 aa, Artificial
  Framework sequence
EVQLVESGGGLAQAGGSLSLSCAASGRFFS

SEQ ID NO: 121 - protein, 30 aa, Artificial
  Framework sequence
EVQLVESGGGLVQAGGSLSLSCAASGRFFS

SEQ ID NO: 122 - protein, 30 aa, Artificial; identical to SEQ ID NO: 121
  Framework sequence

SEQ ID NO: 123 - protein, 30 aa, Artificial
  Framework sequence
EVQLVESGGGLVQAGGSLSLSCVASGRFFS

SEQ ID NO: 124 - protein, 30 aa, Artificial
  Framework sequence
EVQLVESGGGLVQAGGSLSLSCSASGRFFS

SEQ ID NO: 125 - protein, 30 aa, Artificial
  Framework sequence
EVQLVESGGGLVQAGGSLTLSCTASETTVR

SEQ ID NO: 126 - protein, 30 aa, Artificial
  Framework sequence
EVQLVESGGGLVQAGGSLTLSCAPSESTVS

SEQ ID NO: 127 - protein, 30 aa, Artificial
  Framework sequence
EVQLVESGGGLVQAGGSLRLSCAASGIISS

SEQ ID NO: 128 - protein, 30 aa, Artificial
  Framework sequence
EVQLVESGGGLVQAGGSLRLSCVVSGVFGP

SEQ ID NO: 129 - protein, 30 aa, Artificial
  Framework sequence
EVQLVESGGGLVQPGGSLRLSCAASGIGIA

SEQ ID NO: 130 - protein, 30 aa, Artificial
  Framework sequence
EVQLVESGGGLVQPGGSLRLSCAASGIIGS

SEQ ID NO: 131 - protein, 30 aa, Artificial; identical to SEQ ID NO: 127
  Framework sequence

SEQ ID NO: 132 - protein, 30 aa, Artificial; identical to SEQ ID NO: 98
  Framework sequence

SEQ ID NO: 133 - protein, 30 aa, Artificial
  Framework sequence
EVQLVESGGGLVQPGGSLRLSCAGSGFTFS

SEQ ID NO: 134 - protein, 30 aa, Artificial; identical to SEQ ID NO: 8
  Framework sequence

SEQ ID NO: 135 - protein, 30 aa, Artificial; identical to SEQ ID NO: 8
  Framework sequence

SEQ ID NO: 136 - protein, 30 aa, Artificial
  Framework sequence
EVQLVESGGGLVQAGGSLRLSCVASKITFR

SEQ ID NO: 137 - protein, 30 aa, Artificial
  Framework sequence
EVQLVESGGGLVQAGGSLKLSCVASGITFF

SEQ ID NO: 138 - protein, 30 aa, Artificial
  Framework sequence
EVQLVESGGGLVQAGGSLRLSCAASGITFR

SEQ ID NO: 139 - protein, 30 aa, Artificial
  Framework sequence
EVQLVESGGGLVQAGGSLRLSCAASASIFG

SEQ ID NO: 140 - protein, 30 aa, Artificial
  Framework sequence
EVQLVESGGGLVQAGGSLRLSCAASGNIFS

SEQ ID NO: 141 - protein, 30 aa, Artificial
  Framework sequence
EVQLVESGGGLVQAGDSLRLSCAASGRALD

SEQ ID NO: 142 - protein, 30 aa, Artificial
  Framework sequence
EVQLVESGGGLVQPGGSLRLSCAASGFTFD

SEQ ID NO: 143 - protein, 30 aa, Artificial
  Framework sequence
EVQLVESGGGLVQPGGSLKLSCAASGFTFS

SEQ ID NO: 144 - protein, 30 aa, Artificial; identical to SEQ ID NO: 65
  Framework sequence

SEQ ID NO: 145 - protein, 30 aa, Artificial; identical to SEQ ID NO: 65
  Framework sequence

SEQ ID NO: 146 - protein, 30 aa, Artificial
  Framework sequence
EVQLVESGGGLVQAGGSLSLSCAASATLHR

SEQ ID NO: 147 - protein, 30 aa, Artificial
  Framework sequence
EVQLVESGGGLVQPGGSLRLSCAASGFTFS

SEQ ID NO: 148 - protein, 30 aa, Artificial; identical to SEQ ID NO: 147
  Framework sequence

SEQ ID NO: 149 - protein, 30 aa, Artificial
  Framework sequence
EVQLVESGGGLVQPGGSLRLSCAASGFTLD

SEQ ID NO: 150 - protein, 30 aa, Artificial; identical to SEQ ID NO: 32
  Framework sequence

SEQ ID NO: 151 - protein, 30 aa, Artificial; identical to SEQ ID NO: 125
  Framework sequence

SEQ ID NO: 152 - protein, 30 aa, Artificial; identical to SEQ ID NO: 125
  Framework sequence

SEQ ID NO: 153 - protein, 30 aa, Artificial; identical to SEQ ID NO: 125
  Framework sequence

SEQ ID NO: 154 - protein, 30 aa, Artificial; identical to SEQ ID NO: 125
  Framework sequence

SEQ ID NO: 155 - protein, 30 aa, Artificial
  Framework sequence
EVQLVESGGGLVQPGGSLRLSCAASGRIFY

SEQ ID NO: 156 - protein, 30 aa, Artificial; identical to SEQ ID NO: 142
  Framework sequence

SEQ ID NO: 157 - protein, 30 aa, Artificial
  Framework sequence
EVQLVESGGGLVQAGGSLRLSCAASGRTFN

SEQ ID NO: 158 - protein, 30 aa, Artificial; identical to SEQ ID NO: 114
  Framework sequence

SEQ ID NO: 159 - protein, 30 aa, Artificial
  Framework sequence
KVQLVESGGGLVQAGGSLRLSCAASGRTFS

SEQ ID NO: 160 - protein, 30 aa, Artificial; identical to SEQ ID NO: 114
  Framework sequence

SEQ ID NO: 161 - protein, 30 aa, Artificial; identical to SEQ ID NO: 114
  Framework sequence

SEQ ID NO: 162 - protein, 30 aa, Artificial
  Framework sequence
EVQLVESGGGLVQAGGSLRLSCVASGRTFS

SEQ ID NO: 163 - protein, 30 aa, Artificial; identical to SEQ ID NO: 114
  Framework sequence

SEQ ID NO: 164 - protein, 30 aa, Artificial; identical to SEQ ID NO: 114
  Framework sequence

SEQ ID NO: 165 - protein, 30 aa, Artificial
  Framework sequence
EVQLVESGGGLVQAGGSLRLSCEASGLTIS

SEQ ID NO: 166 - protein, 30 aa, Artificial
  Framework sequence
EVQLVESGGGLVQPGGSLRLSCAASGSAFS

SEQ ID NO: 167 - protein, 30 aa, Artificial
  Framework sequence
EVQLVESGGGLVQAGGSLGLSCAAAGRTFS

SEQ ID NO: 168 - protein, 30 aa, Artificial
  Framework sequence
EVQLVESGGGLVQAGGSLRLSCAASGRAFS

SEQ ID NO: 169 - protein, 30 aa, Artificial
  Framework sequence
EVQLVESGGGLVQAGGSLRLSCATSGRTFS

SEQ ID NO: 170 - protein, 30 aa, Artificial
  Framework sequence
EVQLVESGGGLVQPGGSLRLSCAASGNIDG

SEQ ID NO: 171 - protein, 30 aa, Artificial
  Framework sequence
EVQLVESGGGLVQTGGSLRLSCAASGPTFS

SEQ ID NO: 172 - protein, 30 aa, Artificial
  Framework sequence
EVQLVESGGGLVQAGDSLRLSCAASGFTFS

SEQ ID NO: 173 - protein, 30 aa, Artificial
  Framework sequence
EVQLVESGGGLVQAGSSLRLSCALSGRTFS

SEQ ID NO: 174 - protein, 30 aa, Artificial
  Framework sequence
EVQLVESGGGLVQAGGSLRLSCIASERTFS

SEQ ID NO: 175 - protein, 30 aa, Artificial
  Framework sequence
EVQLVESGGGLVQPGDSLRLSCSASEGTLS

SEQ ID NO: 176 - protein, 30 aa, Artificial
  Framework sequence
EVQLVESGGGLVQPGGSLTLSCVGSGRRFS

SEQ ID NO: 177 - protein, 30 aa, Artificial
  Framework sequence
EVQLVESGGGLVQPGGSLPLSCAASGSIFR

SEQ ID NO: 178 - protein, 30 aa, Artificial
  Framework sequence
EVQLVESGGGLAQAGGSLRLSCAVFGRSRY

SEQ ID NO: 179 - protein, 30 aa, Artificial
  Framework sequence
EVQLVESGGGQVQAGGSLRLSCTESGRAFN

SEQ ID NO: 180 - protein, 30 aa, Artificial
  Framework sequence
EVQLVESGGGLVQAGGSLGLSCAASGRTFS

SEQ ID NO: 181 - protein, 30 aa, Artificial
  Framework sequence
EVQLVESGGGLVQAGDSLRLSCVASGGTFG

SEQ ID NO: 182 - protein, 30 aa, Artificial
  Framework sequence
EVQLVESGGGLAQAGDSLRLSCVDSGSSFS

SEQ ID NO: 183 - protein, 30 aa, Artificial
  Framework sequence
EVQLVESGGGLVQAGGSLRLSCAVSGGTFE

SEQ ID NO: 184 - protein, 30 aa, Artificial; identical to SEQ ID NO: 114
  Framework sequence

SEQ ID NO: 185 - protein, 30 aa, Artificial
  Framework sequence
EVQLVESGGGLVQAGDSLRLSCVASGDSFN

SEQ ID NO: 186 - protein, 30 aa, Artificial
  Framework sequence
EVQLVESGGGLVQAGGSLRLSCVVSEGTFS

SEQ ID NO: 187 - protein, 30 aa, Artificial
  Framework sequence
EAQLVESGGGLVQAGGSLRLSCTASGRTYS

SEQ ID NO: 188 - protein, 30 aa, Artificial; identical to SEQ ID NO: 168
  Framework sequence

SEQ ID NO: 189 - protein, 30 aa, Artificial
  Framework sequence
EVQLVESGGGLVQAGGSLRLSCAASGGTFS

SEQ ID NO: 190 - protein, 30 aa, Artificial
  Framework sequence
EVQLVESGGGLVQAGGSLRLSCAASGGAFG

SEQ ID NO: 191 - protein, 30 aa, Artificial
  Framework sequence
EVQLVESGGGLVQAGGSLRLSCAASGGTFG

SEQ ID NO: 192 - protein, 30 aa, Artificial
  Framework sequence
EVQLVESGGGLVQAGGSLELSCAASGGAFG

SEQ ID NO: 193 - protein, 30 aa, Artificial; identical to SEQ ID NO: 191
  Framework sequence

SEQ ID NO: 194 - protein, 30 aa, Artificial; identical to SEQ ID NO: 191
  Framework sequence

SEQ ID NO: 195 - protein, 30 aa, Artificial
  Framework sequence
EVQLVESGGGLVQAGGSLKLSCAVSGRTIV

SEQ ID NO: 196 - protein, 30 aa, Artificial; identical to SEQ ID NO: 147
  Framework sequence

SEQ ID NO: 197 - protein, 30 aa, Artificial; identical to SEQ ID NO: 189
  Framework sequence

SEQ ID NO: 198 - protein, 30 aa, Artificial
  Framework sequence
EVQLVESGGGLVQAGGSLRLSCAASRHTFS

SEQ ID NO: 199 - protein, 30 aa, Artificial
  Framework sequence
EVQLVESGGGLVQTGGSLRLSCAASGRAFS

SEQ ID NO: 200 - protein, 30 aa, Artificial
  Framework sequence
EVQLVESGGGLVQAGGSLRLSCAASGRSFN

SEQ ID NO: 201 - protein, 30 aa, Artificial
  Framework sequence
EVQLVESGGGLVRAGTSLRLSCADSARTFS

SEQ ID NO: 202 - protein, 30 aa, Artificial
  Framework sequence
EVQLVESGGGLVQPGGSLRLSCTVFGRTFS

SEQ ID NO: 203 - protein, 30 aa, Artificial
  Framework sequence
EVQLVESGGGLVQAGGSLGLSCAASGRTVS

SEQ ID NO: 204 - protein, 30 aa, Artificial
  Framework sequence
EVQLVESGGGLVQAGGSLRLSCVASGRTLS

SEQ ID NO: 205 - protein, 30 aa, Artificial; identical to SEQ ID NO: 204
  Framework sequence

SEQ ID NO: 206 - protein, 30 aa, Artificial; identical to SEQ ID NO: 114
  Framework sequence

SEQ ID NO: 207 - protein, 30 aa, Artificial; identical to SEQ ID NO: 204
  Framework sequence

SEQ ID NO: 208 - protein, 30 aa, Artificial
  Framework sequence
EVQLVESGGGLVQAGGSLRLSCVRSGGYFG

SEQ ID NO: 209 - protein, 30 aa, Artificial
  Framework sequence
EVQLVESGGGLVQPGGSLRLSCAASGSIFS

SEQ ID NO: 210 - protein, 30 aa, Artificial
  Framework sequence
EMQLVESGGGLVQAGGSLRLSCATSERTFS

SEQ ID NO: 211 - protein, 30 aa, Artificial
  Framework sequence
EVQLVESGGGLVQPGGSLRLSCAASRSIFS

SEQ ID NO: 212 - protein, 30 aa, Artificial; identical to SEQ ID NO: 189
  Framework sequence

SEQ ID NO: 213 - protein, 30 aa, Artificial
  Framework sequence
EVQLVESGGGLVQAGGSLRLSCAVSGFLFD

SEQ ID NO: 214 - protein, 30 aa, Artificial
  Framework sequence
EVQLVESGGGLVQPGGSLRLSCAASRSIRS

SEQ ID NO: 215 - protein, 30 aa, Artificial
  Framework sequence
EVQLVESGGALVQPGGSLRLSCAASGSIRS

SEQ ID NO: 216 - protein, 30 aa, Artificial
  Framework sequence
EVQLVESGGALVQPGGSLRLSCAASDSIRS

SEQ ID NO: 217 - protein, 30 aa, Artificial
  Framework sequence
EVQLVESGGGLVQPGGSLRLSCAASGSSAS

SEQ ID NO: 218 - protein, 30 aa, Artificial
  Framework sequence
EVQLVESGGGLVQPGGSLRLSCAASRNIFD

SEQ ID NO: 219 - protein, 30 aa, Artificial; identical to SEQ ID NO: 189
  Framework sequence

SEQ ID NO: 220 - protein, 30 aa, Artificial
  Framework sequence
EVQLVESGGGLVQAGGSLSLSCAASGGTFN

SEQ ID NO: 221 - protein, 30 aa, Artificial
  Framework sequence
EVQLVESGGGLVQAGGSLRLSCAISGRTLS

SEQ ID NO: 222 - protein, 30 aa, Artificial
  Framework sequence
EVQLVESGGGLVQAGGSLRLSCAVSGRTFN

SEQ ID NO: 223 - protein, 30 aa, Artificial
  Framework sequence
EVQLVESGGGLVRPGGSLRLSCATSGSDIG

SEQ ID NO: 224 - protein, 30 aa, Artificial
  Framework sequence
EVQLVESGGGLVQAGGSLRLSCAASGRALI

SEQ ID NO: 225 - protein, 30 aa, Artificial
  Framework sequence
EVQLVESGGGVVQAGGSLRLSCAPSGRTFS

SEQ ID NO: 226 - protein, 30 aa, Artificial
  Framework sequence
EVQLVESGGGLVQAGGSLRLSCAPSGRTFS

SEQ ID NO: 227 - protein, 30 aa, Artificial
  Framework sequence
EVQLVESGGGLVQAGGSLRLSCAASGRPVN

SEQ ID NO: 228 - protein, 30 aa, Artificial; identical to SEQ ID NO: 114
  Framework sequence

SEQ ID NO: 229 - protein, 30 aa, Artificial
  Framework sequence
EVQLVESGGGLVQAGGSLRLSCAASGRTYN

SEQ ID NO: 230 - protein, 30 aa, Artificial
  Framework sequence
EVQLVESGGGLVQAGGSLRLSCTASGQTFN

SEQ ID NO: 231 - protein, 30 aa, Artificial
  Framework sequence
EVQLVESGGAFVQPGGSLRLSCAASGSDVW

SEQ ID NO: 232 - protein, 30 aa, Artificial
  Framework sequence
EVQLVESGGGLVQAGGSLRLSCTASGRAFN

SEQ ID NO: 233 - protein, 30 aa, Artificial
  Framework sequence
EVQLVESGGGLVQAGGSLRLSCQLSGGTVS

SEQ ID NO: 234 - protein, 30 aa, Artificial
  Framework sequence
EVQLVESGGGLVQAGGSLRLSCAASGSIFR

SEQ ID NO: 235 - protein, 30 aa, Artificial
  Framework sequence
EVQLVESGGGLVQPGGSLRLSCAGSGNIVR

SEQ ID NO: 236 - protein, 30 aa, Artificial; identical to SEQ ID NO: 114
  Framework sequence

SEQ ID NO: 237 - protein, 30 aa, Artificial
  Framework sequence
EVQLVESGGGLVQAGGSLRLSCAASGRTFE

SEQ ID NO: 238 - protein, 30 aa, Artificial
  Framework sequence
EVQLVESGGDLVQPGESLRLSCAVSGVTVD

SEQ ID NO: 239 - protein, 30 aa, Artificial
  Framework sequence
EVQLVESGGGLVQAGASLRLSCAASGRTFS

SEQ ID NO: 240 - protein, 30 aa, Artificial
  Framework sequence
EVQLVESGGGLVQTGGSLRLSCAASGRTFS

SEQ ID NO: 241 - protein, 30 aa, Artificial; identical to SEQ ID NO: 114
  Framework sequence

SEQ ID NO: 242 - protein, 30 aa, Artificial
  Framework sequence
EVQLVESGGGLVQAGGSLRLSCAVSGLTFS

SEQ ID NO: 243 - protein, 30 aa, Artificial; identical to SEQ ID NO: 242
  Framework sequence

SEQ ID NO: 244 - protein, 30 aa, Artificial
  Framework sequence
EVQLVESGGGLVQPGGSLRLSCAASGITFR

SEQ ID NO: 245 - protein, 30 aa, Artificial
  Framework sequence
EVQLVESGGGLVQAGGSLRLSCTASGGTFG

SEQ ID NO: 246 - protein, 30 aa, Artificial
  Framework sequence
EVQLVESGGGLVQAGGSLRLSCAASEPTFS

SEQ ID NO: 247 - protein, 30 aa, Artificial
  Framework sequence
EVQLVESGGGLVQAGGSLRLSCVASGRTSS

SEQ ID NO: 248 - protein, 30 aa, Artificial
  Framework sequence
EVQLVESGGGLVQAGGSLSLSCAASGRTFS

SEQ ID NO: 249 - protein, 30 aa, Artificial; identical to SEQ ID NO: 114
  Framework sequence

SEQ ID NO: 250 - protein, 30 aa, Artificial
  Framework sequence
EVQLVESGGGLVQPGGSLRLSCAASGSSLS

SEQ ID NO: 251 - protein, 30 aa, Artificial
  Framework sequence
EVQLVESGGGLVQAGGSLRLSCAASGRALS

SEQ ID NO: 252 - protein, 30 aa, Artificial; identical to SEQ ID NO: 224
  Framework sequence

SEQ ID NO: 253 - protein, 30 aa, Artificial
  Framework sequence
EVQLVESGGGLVQAGGSLRLSCAASGRTSS

SEQ ID NO: 254 - protein, 30 aa, Artificial
  Framework sequence
EVQLVESGGGLVQPGGSLRLSCAHSGRAFS

SEQ ID NO: 255 - protein, 30 aa, Artificial; identical to SEQ ID NO: 114
  Framework sequence

SEQ ID NO: 256 - protein, 30 aa, Artificial
  Framework sequence
EVQLVESGGGLVQAGGSLRLSCAASGGIFS

SEQ ID NO: 257 - protein, 30 aa, Artificial
  Framework sequence
EVQLVESGGGLVQAGGSLRLSCAASGRIFS

SEQ ID NO: 258 - protein, 30 aa, Artificial
  Framework sequence
EVQLVESGGGLVQAGGSLRLSCAASGRTFI

SEQ ID NO: 259 - protein, 30 aa, Artificial
  Framework sequence
EVQLVESGGGLVQPGGSLRLSCAASGSIDS

SEQ ID NO: 260 - protein, 30 aa, Artificial
  Framework sequence
EVQLVESGGGLVQSGGSLRLSCVASGTIVS

SEQ ID NO: 261 - protein, 30 aa, Artificial
  Framework sequence
EVQLVESGGGMVQAGGSLRLSCAASGLTLS

SEQ ID NO: 262 - protein, 30 aa, Artificial; identical to SEQ ID NO: 258
  Framework sequence

SEQ ID NO: 263 - protein, 30 aa, Artificial; identical to SEQ ID NO: 162
  Framework sequence

SEQ ID NO: 264 - protein, 30 aa, Artificial
  Framework sequence
EVQLVESGGGLVQDGGSLRLSCAASGQLAN

SEQ ID NO: 265 - protein, 30 aa, Artificial; identical to SEQ ID NO: 159
  Framework sequence

SEQ ID NO: 266 - protein, 30 aa, Artificial
  Framework sequence
EVQLVESGGGLVQAGGSLTLSCVISGLTLE

SEQ ID NO: 267 - protein, 30 aa, Artificial
  Framework sequence
EVQLVESGGGLVQPGGSLRLSCAASGRTFS

SEQ ID NO: 268 - protein, 30 aa, Artificial
  Framework sequence
EVQLVESGGGSVQPGGSLRLSCVASGSISS

SEQ ID NO: 269 - protein, 30 aa, Artificial; identical to SEQ ID NO: 268
  Framework sequence

SEQ ID NO: 270 - protein, 30 aa, Artificial
  Framework sequence
EVQLVESGGGLVQPGGSLRLSCAASGNIKS

SEQ ID NO: 271 - protein, 30 aa, Artificial
  Framework sequence
EVQLVESGGGLVQAGGSLRLSCAASGFSFA

SEQ ID NO: 272 - protein, 30 aa, Artificial
  Framework sequence
EVQLVESGGGLVQPGGSLRLSCAASGFPFG

SEQ ID NO: 273 - protein, 30 aa, Artificial
  Framework sequence
EVQLVESGGGLEQAGGSLRLSCAASGLTFR

SEQ ID NO: 274 - protein, 30 aa, Artificial
  Framework sequence
EVQLVESGGGLVQAGGSLRLSCAASGFSLD

SEQ ID NO: 275 - protein, 30 aa, Artificial
  Framework sequence
EMQLVESGGGLVQPGGSLRLSCAASGNIPP

SEQ ID NO: 276 - protein, 5 aa, Artificial
  CDR sequence
DYGMT

SEQ ID NO: 277 - protein, 5 aa, Artificial
  CDR sequence
DYAMT

SEQ ID NO: 278 - protein, 5 aa, Artificial
  CDR sequence
DYGMT

SEQ ID NO: 279 - protein, 5 aa, Artificial
  CDR sequence
DYGMT

SEQ ID NO: 280 - protein, 5 aa, Artificial
  CDR sequence
DYGMT

SEQ ID NO: 281 - protein, 5 aa, Artificial
  CDR sequence
DYGMT

SEQ ID NO: 282 - protein, 5 aa, Artificial
  CDR sequence
DYGMT

SEQ ID NO: 283 - protein, 5 aa, Artificial
  CDR sequence
RYTMG

SEQ ID NO: 284 - protein, 5 aa, Artificial
  CDR sequence
DYGMT

SEQ ID NO: 285 - protein, 5 aa, Artificial
  CDR sequence
DYGMT

SEQ ID NO: 286 - protein, 5 aa, Artificial
  CDR sequence
DYGMT

SEQ ID NO: 287 - protein, 5 aa, Artificial
  CDR sequence
DYGMT

SEQ ID NO: 288 - protein, 5 aa, Artificial
  CDR sequence
DYAMT

SEQ ID NO: 289 - protein, 5 aa, Artificial
  CDR sequence
DYGMT

SEQ ID NO: 290 - protein, 5 aa, Artificial
  CDR sequence
DYGMT

SEQ ID NO: 291 - protein, 5 aa, Artificial
  CDR sequence
DYGMT

SEQ ID NO: 292 - protein, 5 aa, Artificial
  CDR sequence
DYGMT

SEQ ID NO: 293 - protein, 5 aa, Artificial
  CDR sequence
DYGMT

SEQ ID NO: 294 - protein, 5 aa, Artificial
  CDR sequence
DYGMT

SEQ ID NO: 295 - protein, 5 aa, Artificial
  CDR sequence
DYGMT

SEQ ID NO: 296 - protein, 5 aa, Artificial
  CDR sequence
DYGMT

SEQ ID NO: 297 - protein, 5 aa, Artificial
  CDR sequence
DYGMT

SEQ ID NO: 298 - protein, 5 aa, Artificial
  CDR sequence
DYGMT

SEQ ID NO: 299 - protein, 5 aa, Artificial
  CDR sequence
DYAMT

SEQ ID NO: 300 - protein, 5 aa, Artificial
  CDR sequence
DYAMT

SEQ ID NO: 301 - protein, 5 aa, Artificial
  CDR sequence
DYGMT

SEQ ID NO: 302 - protein, 5 aa, Artificial
  CDR sequence
DYGMT

SEQ ID NO: 303 - protein, 5 aa, Artificial
  CDR sequence
DYGMT

SEQ ID NO: 304 - protein, 5 aa, Artificial
  CDR sequence
NYAMT

SEQ ID NO: 305 - protein, 5 aa, Artificial
  CDR sequence
DYGMT

SEQ ID NO: 306 - protein, 5 aa, Artificial
  CDR sequence
DYAMT

SEQ ID NO: 307 - protein, 5 aa, Artificial
  CDR sequence
DYAMS

SEQ ID NO: 308 - protein, 5 aa, Artificial
  CDR sequence
DYAMS

SEQ ID NO: 309 - protein, 5 aa, Artificial
  CDR sequence
DYAMS

SEQ ID NO: 310 - protein, 5 aa, Artificial
  CDR sequence
DYAMS

SEQ ID NO: 311 - protein, 5 aa, Artificial
  CDR sequence
DYAMS

SEQ ID NO: 312 - protein, 5 aa, Artificial
  CDR sequence
DYAMS

SEQ ID NO: 313 - protein, 5 aa, Artificial
  CDR sequence
DYAMS

SEQ ID NO: 314 - protein, 5 aa, Artificial
  CDR sequence
DYAMS

SEQ ID NO: 315 - protein, 5 aa, Artificial
  CDR sequence
DYAMS

SEQ ID NO: 316 - protein, 5 aa, Artificial
  CDR sequence
DYAMS

SEQ ID NO: 317 - protein, 5 aa, Artificial
  CDR sequence
DYALS

SEQ ID NO: 318 - protein, 5 aa, Artificial
  CDR sequence
DYAMT

SEQ ID NO: 319 - protein, 5 aa, Artificial
  CDR sequence
DYAMT

SEQ ID NO: 320 - protein, 5 aa, Artificial
  CDR sequence
DYAMS

SEQ ID NO: 321 - protein, 5 aa, Artificial
  CDR sequence
DYAMT

SEQ ID NO: 322 - protein, 5 aa, Artificial
  CDR sequence
DYAMT

SEQ ID NO: 323 - protein, 5 aa, Artificial
  CDR sequence
DYAMS

SEQ ID NO: 324 - protein, 5 aa, Artificial
  CDR sequence
DYAMT

SEQ ID NO: 325 - protein, 5 aa, Artificial
  CDR sequence
DYAMS

SEQ ID NO: 326 - protein, 5 aa, Artificial
  CDR sequence
DYGMS

SEQ ID NO: 327 - protein, 5 aa, Artificial
  CDR sequence
DYAMT

SEQ ID NO: 328 - protein, 5 aa, Artificial
  CDR sequence
DYAMT

SEQ ID NO: 329 - protein, 5 aa, Artificial
  CDR sequence
DYAMT

SEQ ID NO: 330 - protein, 5 aa, Artificial
  CDR sequence
DYAMT

SEQ ID NO: 331 - protein, 5 aa, Artificial
  CDR sequence
DYAMT

SEQ ID NO: 332 - protein, 5 aa, Artificial
  CDR sequence
DYAMT

SEQ ID NO: 333 - protein, 5 aa, Artificial
  CDR sequence
DYAMT

SEQ ID NO: 334 - protein, 5 aa, Artificial
  CDR sequence
DYGMS

SEQ ID NO: 335 - protein, 5 aa, Artificial
  CDR sequence
DYAMT

SEQ ID NO: 336 - protein, 5 aa, Artificial
  CDR sequence
DYAMS

SEQ ID NO: 337 - protein, 5 aa, Artificial
  CDR sequence
INTMG

SEQ ID NO: 338 - protein, 5 aa, Artificial
  CDR sequence
EYAAA

SEQ ID NO: 339 - protein, 5 aa, Artificial
  CDR sequence
FNDMA

SEQ ID NO: 340 - protein, 5 aa, Artificial
  CDR sequence
SYGMG

SEQ ID NO: 341 - protein, 5 aa, Artificial
  CDR sequence
SYGMG

SEQ ID NO: 342 - protein, 5 aa, Artificial
  CDR sequence
SYGMG

SEQ ID NO: 343 - protein, 5 aa, Artificial
  CDR sequence
SYGMG

SEQ ID NO: 344 - protein, 5 aa, Artificial
  CDR sequence
SYGMG

SEQ ID NO: 345 - protein, 5 aa, Artificial
  CDR sequence
SYGMG

SEQ ID NO: 346 - protein, 5 aa, Artificial
  CDR sequence
SYGMG

SEQ ID NO: 347 - protein, 5 aa, Artificial
  CDR sequence
SYGMG

SEQ ID NO: 348 - protein, 5 aa, Artificial
  CDR sequence
SYGMG

SEQ ID NO: 349 - protein, 5 aa, Artificial
  CDR sequence
SYGMG

SEQ ID NO: 350 - protein, 5 aa, Artificial
  CDR sequence
SYGMG

SEQ ID NO: 351 - protein, 5 aa, Artificial
  CDR sequence
SYGMG

SEQ ID NO: 352 - protein, 5 aa, Artificial
  CDR sequence
RYDMG

SEQ ID NO: 353 - protein, 5 aa, Artificial
  CDR sequence
EYSMG

SEQ ID NO: 354 - protein, 5 aa, Artificial
  CDR sequence
DYGIG

SEQ ID NO: 355 - protein, 5 aa, Artificial
  CDR sequence
SYAMS

SEQ ID NO: 356 - protein, 5 aa, Artificial
  CDR sequence
TSAMG

SEQ ID NO: 357 - protein, 5 aa, Artificial
  CDR sequence
TRTMA

SEQ ID NO: 358 - protein, 5 aa, Artificial
  CDR sequence
TRTMA

SEQ ID NO: 359 - protein, 5 aa, Artificial
  CDR sequence
TRTMA

SEQ ID NO: 360 - protein, 5 aa, Artificial
  CDR sequence
SRTMA

SEQ ID NO: 361 - protein, 5 aa, Artificial
  CDR sequence
TRTMA

SEQ ID NO: 362 - protein, 5 aa, Artificial
  CDR sequence
TRTMA

SEQ ID NO: 363 - protein, 5 aa, Artificial
  CDR sequence
TRTMA

SEQ ID NO: 364 - protein, 5 aa, Artificial
  CDR sequence
TRTMA

SEQ ID NO: 365 - protein, 5 aa, Artificial
  CDR sequence
IRTMA

SEQ ID NO: 366 - protein, 5 aa, Artificial
  CDR sequence
IRTMA

SEQ ID NO: 367 - protein, 5 aa, Artificial
  CDR sequence
IRTMA

SEQ ID NO: 368 - protein, 5 aa, Artificial
  CDR sequence
IRTMA

SEQ ID NO: 369 - protein, 5 aa, Artificial
  CDR sequence
SRTMA

SEQ ID NO: 370 - protein, 5 aa, Artificial
  CDR sequence
RYVMG

SEQ ID NO: 371 - protein, 5 aa, Artificial
  CDR sequence
RYDMG

SEQ ID NO: 372 - protein, 5 aa, Artificial
  CDR sequence
RYDMG

SEQ ID NO: 373 - protein, 7 aa, Artificial
  CDR sequence
FSRRTMA

SEQ ID NO: 374 - protein, 7 aa, Artificial
  CDR sequence
FSRRTMA

SEQ ID NO: 375 - protein, 5 aa, Artificial
  CDR sequence
IRVMA

SEQ ID NO: 376 - protein, 5 aa, Artificial
  CDR sequence
IRTMA

SEQ ID NO: 377 - protein, 4 aa, Artificial
  CDR sequence
RAIA

SEQ ID NO: 378 - protein, 7 aa, Artificial
  CDR sequence
FSRRTMA

SEQ ID NO: 379 - protein, 5 aa, Artificial
  CDR sequence
IRTMA

SEQ ID NO: 380 - protein, 5 aa, Artificial
  CDR sequence
IRAMA

SEQ ID NO: 381 - protein, 5 aa, Artificial
  CDR sequence
IRAMA

SEQ ID NO: 382 - protein, 4 aa, Artificial
  CDR sequence
HAMA

SEQ ID NO: 383 - protein, 5 aa, Artificial
  CDR sequence
IRTMA

SEQ ID NO: 384 - protein, 5 aa, Artificial
  CDR sequence
IRTMA

SEQ ID NO: 385 - protein, 5 aa, Artificial
  CDR sequence
IRTMA

SEQ ID NO: 386 - protein, 5 aa, Artificial
  CDR sequence
IRAMA

SEQ ID NO: 387 - protein, 5 aa, Artificial
  CDR sequence
IRAMA

SEQ ID NO: 388 - protein, 5 aa, Artificial
  CDR sequence
IRAMA

SEQ ID NO: 389 - protein, 5 aa, Artificial
  CDR sequence
DDAMG

SEQ ID NO: 390 - protein, 5 aa, Artificial
  CDR sequence
DDAVG

SEQ ID NO: 391 - protein, 5 aa, Artificial
  CDR sequence
TDMMG

SEQ ID NO: 392 - protein, 5 aa, Artificial
  CDR sequence
LRAMA

SEQ ID NO: 393 - protein, 6 aa, Artificial
  CDR sequence
DSNAIG

SEQ ID NO: 394 - protein, 5 aa, Artificial
  CDR sequence
LDIMA

SEQ ID NO: 395 - protein, 5 aa, Artificial
  CDR sequence
TRVMA

SEQ ID NO: 396 - protein, 5 aa, Artificial
  CDR sequence
TRVMA

SEQ ID NO: 397 - protein, 5 aa, Artificial
  CDR sequence
TRVMA

SEQ ID NO: 398 - protein, 5 aa, Artificial
  CDR sequence
TRVMA

SEQ ID NO: 399 - protein, 5 aa, Artificial
  CDR sequence
TRVMA

SEQ ID NO: 400 - protein, 5 aa, Artificial
  CDR sequence
IRTMA

SEQ ID NO: 401 - protein, 5 aa, Artificial
  CDR sequence
FNTVA

SEQ ID NO: 402 - protein, 5 aa, Artificial
  CDR sequence
FRTMA

SEQ ID NO: 403 - protein, 5 aa, Artificial
  CDR sequence
IRAMA

SEQ ID NO: 404 - protein, 7 aa, Artificial
  CDR sequence
FSSRTMA

SEQ ID NO: 405 - protein, 5 aa, Artificial
  CDR sequence
FRTMA

SEQ ID NO: 406 - protein, 5 aa, Artificial
  CDR sequence
FRTLA

SEQ ID NO: 407 - protein, 7 aa, Artificial
  CDR sequence
FSRRTMA

SEQ ID NO: 408 - protein, 5 aa, Artificial
  CDR sequence
NYAMT

SEQ ID NO: 409 - protein, 5 aa, Artificial
  CDR sequence
RYTMG

SEQ ID NO: 410 - protein, 5 aa, Artificial
  CDR sequence
RYTMG

SEQ ID NO: 411 - protein, 5 aa, Artificial
  CDR sequence
RYIMD

SEQ ID NO: 412 - protein, 5 aa, Artificial
  CDR sequence
RYTMG

SEQ ID NO: 413 - protein, 5 aa, Artificial
  CDR sequence
RYDMG

SEQ ID NO: 414 - protein, 5 aa, Artificial
  CDR sequence
FDSMG

SEQ ID NO: 415 - protein, 5 aa, Artificial
  CDR sequence
HNAMG

SEQ ID NO: 416 - protein, 5 aa, Artificial
  CDR sequence
TYVMG

SEQ ID NO: 417 - protein, 5 aa, Artificial
  CDR sequence
DYSMS

SEQ ID NO: 418 - protein, 5 aa, Artificial
  CDR sequence
SYRMY

SEQ ID NO: 419 - protein, 5 aa, Artificial
  CDR sequence
INRMA

SEQ ID NO: 420 - protein, 5 aa, Artificial
  CDR sequence
INRWG

SEQ ID NO: 421 - protein, 4 aa, Artificial
  CDR sequence
FDNN

SEQ ID NO: 422 - protein, 5 aa, Artificial
  CDR sequence
SYAMS

SEQ ID NO: 423 - protein, 5 aa, Artificial
  CDR sequence
SYAMS

SEQ ID NO: 424 - protein, 5 aa, Artificial
  CDR sequence
YCAIG

SEQ ID NO: 425 - protein, 5 aa, Artificial
  CDR sequence
DYAMS

SEQ ID NO: 426 - protein, 5 aa, Artificial
  CDR sequence
IRTMA

SEQ ID NO: 427 - protein, 5 aa, Artificial
  CDR sequence
IRTMA

SEQ ID NO: 428 - protein, 5 aa, Artificial
  CDR sequence
IRTMA

SEQ ID NO: 429 - protein, 5 aa, Artificial
  CDR sequence
IRTMA

SEQ ID NO: 430 - protein, 3 aa, Artificial
  CDR sequence
PMG

SEQ ID NO: 431 - protein, 5 aa, Artificial
  CDR sequence
DYATS

SEQ ID NO: 432 - protein, 3 aa, Artificial
  CDR sequence
AMG

SEQ ID NO: 433 - protein, 5 aa, Artificial
  CDR sequence
SYAMA

SEQ ID NO: 434 - protein, 5 aa, Artificial
  CDR sequence
SYAMA

SEQ ID NO: 435 - protein, 5 aa, Artificial
  CDR sequence
SYAMA

SEQ ID NO: 436 - protein, 5 aa, Artificial
  CDR sequence
SYAMG

SEQ ID NO: 437 - protein, 5 aa, Artificial
  CDR sequence
NYALA

SEQ ID NO: 438 - protein, 5 aa, Artificial
  CDR sequence
RFAMG

SEQ ID NO: 439 - protein, 5 aa, Artificial
  CDR sequence
SYAMA

SEQ ID NO: 440 - protein, 5 aa, Artificial
  CDR sequence
SLTMA

SEQ ID NO: 441 - protein, 5 aa, Artificial
  CDR sequence
IKSMG

SEQ ID NO: 442 - protein, 5 aa, Artificial
  CDR sequence
SSLMG

SEQ ID NO: 443 - protein, 5 aa, Artificial
  CDR sequence
SYAMG

SEQ ID NO: 444 - protein, 6 aa, Artificial
  CDR sequence
TYASMG

SEQ ID NO: 445 - protein, 5 aa, Artificial
  CDR sequence
IITMG

SEQ ID NO: 446 - protein, 5 aa, Artificial
  CDR sequence
DYAIG

SEQ ID NO: 447 - protein, 5 aa, Artificial
  CDR sequence
NHIMG

SEQ ID NO: 448 - protein, 5 aa, Artificial
  CDR sequence
DYAIG

SEQ ID NO: 449 - protein, 5 aa, Artificial
  CDR sequence
SAGVG

SEQ ID NO: 450 - protein, 5 aa, Artificial
  CDR sequence
RSRVA

SEQ ID NO: 451 - protein, 5 aa, Artificial
  CDR sequence
ADVMG

SEQ ID NO: 452 - protein, 5 aa, Artificial
  CDR sequence
MNDMG

SEQ ID NO: 453 - protein, 3 aa, Artificial
  CDR sequence
GMA

SEQ ID NO: 454 - protein, 5 aa, Artificial
  CDR sequence
TRAMG

SEQ ID NO: 455 - protein, 5 aa, Artificial
  CDR sequence
NYAMG

SEQ ID NO: 456 - protein, 5 aa, Artificial
  CDR sequence
SYAMG

SEQ ID NO: 457 - protein, 5 aa, Artificial
  CDR sequence
AYAMG

SEQ ID NO: 458 - protein, 5 aa, Artificial
  CDR sequence
SDTMA

SEQ ID NO: 459 - protein, 5 aa, Artificial
  CDR sequence
SNAMA

SEQ ID NO: 460 - protein, 5 aa, Artificial
  CDR sequence
TYTMG

SEQ ID NO: 461 - protein, 5 aa, Artificial
  CDR sequence
SYSMG

SEQ ID NO: 462 - protein, 4 aa, Artificial
  CDR sequence
TTMG

SEQ ID NO: 463 - protein, 5 aa, Artificial
  CDR sequence
SYAMG

SEQ ID NO: 464 - protein, 5 aa, Artificial
  CDR sequence
VYHMA

SEQ ID NO: 465 - protein, 5 aa, Artificial
  CDR sequence
VYHMG

SEQ ID NO: 466 - protein, 5 aa, Artificial
  CDR sequence
VYHMG

SEQ ID NO: 467 - protein, 5 aa, Artificial
  CDR sequence
VYHMG

SEQ ID NO: 468 - protein, 5 aa, Artificial
  CDR sequence
VYTMA

SEQ ID NO: 469 - protein, 5 aa, Artificial
  CDR sequence
VYHMG

SEQ ID NO: 470 - protein, 5 aa, Artificial
  CDR sequence
PYTMA

SEQ ID NO: 471 - protein, 5 aa, Artificial
  CDR sequence
SYAMS

SEQ ID NO: 472 - protein, 5 aa, Artificial
  CDR sequence
SGVMA

SEQ ID NO: 473 - protein, 5 aa, Artificial
  CDR sequence
GYAMG

SEQ ID NO: 474 - protein, 5 aa, Artificial
  CDR sequence
TYGMG

SEQ ID NO: 475 - protein, 5 aa, Artificial
  CDR sequence
DYTMG

SEQ ID NO: 476 - protein, 5 aa, Artificial
  CDR sequence
SAAMG

SEQ ID NO: 477 - protein, 5 aa, Artificial
  CDR sequence
GDVIG

SEQ ID NO: 478 - protein, 3 aa, Artificial
  CDR sequence
TMG

SEQ ID NO: 479 - protein, 5 aa, Artificial
  CDR sequence
TTGVG

SEQ ID NO: 480 - protein, 5 aa, Artificial
  CDR sequence
TTGVG

SEQ ID NO: 481 - protein, 5 aa, Artificial
  CDR sequence
RDVMG

SEQ ID NO: 482 - protein, 5 aa, Artificial
  CDR sequence
TTGVG

SEQ ID NO: 483 - protein, 5 aa, Artificial
  CDR sequence
SYHIG

SEQ ID NO: 484 - protein, 5 aa, Artificial
  CDR sequence
INAMG

SEQ ID NO: 485 - protein, 5 aa, Artificial
  CDR sequence
TYTMA

SEQ ID NO: 486 - protein, 5 aa, Artificial
  CDR sequence
PNVVG

SEQ ID NO: 487 - protein, 5 aa, Artificial
  CDR sequence
RYKMG

SEQ ID NO: 488 - protein, 5 aa, Artificial
  CDR sequence
SYAMG

SEQ ID NO: 489 - protein, 5 aa, Artificial
  CDR sequence
VSVMG

SEQ ID NO: 490 - protein, 5 aa, Artificial
  CDR sequence
INTMG

SEQ ID NO: 491 - protein, 5 aa, Artificial
  CDR sequence
INIMG

SEQ ID NO: 492 - protein, 5 aa, Artificial
  CDR sequence
INTMG

SEQ ID NO: 493 - protein, 5 aa, Artificial
  CDR sequence
FNDMG

SEQ ID NO: 494 - protein, 5 aa, Artificial
  CDR sequence
GRGMG

SEQ ID NO: 495 - protein, 5 aa, Artificial
  CDR sequence
GRAVG

SEQ ID NO: 496 - protein, 5 aa, Artificial
  CDR sequence
GRAMG

SEQ ID NO: 497 - protein, 5 aa, Artificial
  CDR sequence
NDHMG

SEQ ID NO: 498 - protein, 5 aa, Artificial
  CDR sequence
INAMG

SEQ ID NO: 499 - protein, 5 aa, Artificial
  CDR sequence
NYAMG

SEQ ID NO: 500 - protein, 5 aa, Artificial
  CDR sequence
SYVMG

SEQ ID NO: 501 - protein, 5 aa, Artificial
  CDR sequence
SYVMG

SEQ ID NO: 502 - protein, 5 aa, Artificial
  CDR sequence
NYIMG

SEQ ID NO: 503 - protein, 5 aa, Artificial
  CDR sequence
AYAMG

SEQ ID NO: 504 - protein, 2 aa, Artificial
  CDR sequence
MA

SEQ ID NO: 505 - protein, 2 aa, Artificial
  CDR sequence
MG

SEQ ID NO: 506 - protein, 5 aa, Artificial
  CDR sequence
FNVMG

SEQ ID NO: 507 - protein, 2 aa, Artificial
  CDR sequence
MG

SEQ ID NO: 508 - protein, 5 aa, Artificial
  CDR sequence
DLHMG

SEQ ID NO: 509 - protein, 5 aa, Artificial
  CDR sequence
VNHMG

SEQ ID NO: 510 - protein, 5 aa, Artificial
  CDR sequence
DNTMA

SEQ ID NO: 511 - protein, 5 aa, Artificial
  CDR sequence
MYLMG

SEQ ID NO: 512 - protein, 5 aa, Artificial
  CDR sequence
RYAMG

SEQ ID NO: 513 - protein, 5 aa, Artificial
  CDR sequence
YSGIG

SEQ ID NO: 514 - protein, 5 aa, Artificial
  CDR sequence
RYDIG

SEQ ID NO: 515 - protein, 5 aa, Artificial
  CDR sequence
GSRMG

SEQ ID NO: 516 - protein, 5 aa, Artificial
  CDR sequence
GSRMG

SEQ ID NO: 517 - protein, 5 aa, Artificial
  CDR sequence
SYAMG

SEQ ID NO: 518 - protein, 5 aa, Artificial
  CDR sequence
TYAMG

SEQ ID NO: 519 - protein, 5 aa, Artificial
  CDR sequence
FKAMG

SEQ ID NO: 520 - protein, 5 aa, Artificial
  CDR sequence
SYALG

SEQ ID NO: 521 - protein, 5 aa, Artificial
  CDR sequence
SVAMG

SEQ ID NO: 522 - protein, 5 aa, Artificial
  CDR sequence
YYHMA

SEQ ID NO: 523 - protein, 5 aa, Artificial
  CDR sequence
NYRMA

SEQ ID NO: 524 - protein, 5 aa, Artificial
  CDR sequence
RYAMH

SEQ ID NO: 525 - protein, 5 aa, Artificial
  CDR sequence
FNAMG

SEQ ID NO: 526 - protein, 5 aa, Artificial
  CDR sequence
NYAMR

SEQ ID NO: 527 - protein, 5 aa, Artificial
  CDR sequence
SFAMR

SEQ ID NO: 528 - protein, 5 aa, Artificial
  CDR sequence
GYGMG

SEQ ID NO: 529 - protein, 5 aa, Artificial
  CDR sequence
LRTMG

SEQ ID NO: 530 - protein, 5 aa, Artificial
  CDR sequence
RYAMG

SEQ ID NO: 531 - protein, 5 aa, Artificial
  CDR sequence
SHAIS

SEQ ID NO: 532 - protein, 5 aa, Artificial
  CDR sequence
NYAWS

SEQ ID NO: 533 - protein, 5 aa, Artificial
  CDR sequence
SSPMG

SEQ ID NO: 534 - protein, 5 aa, Artificial
  CDR sequence
IHVVG

SEQ ID NO: 535 - protein, 5 aa, Artificial
  CDR sequence
INATS

SEQ ID NO: 536 - protein, 5 aa, Artificial
  CDR sequence
NYGMG

SEQ ID NO: 537 - protein, 6 aa, Artificial
  CDR sequence
SNYAMG

SEQ ID NO: 538 - protein, 5 aa, Artificial
  CDR sequence
GYSVG

SEQ ID NO: 539 - protein, 7 aa, Artificial
  CDR sequence
FASYAMG

SEQ ID NO: 540 - protein, 5 aa, Artificial
  CDR sequence
NYSVG

SEQ ID NO: 541 - protein, 5 aa, Artificial
  CDR sequence
SHAMG

SEQ ID NO: 542 - protein, 5 aa, Artificial
  CDR sequence
DLALG

SEQ ID NO: 543 - protein, 5 aa, Artificial
  CDR sequence
TNAMG

SEQ ID NO: 544 - protein, 5 aa, Artificial
  CDR sequence
VNAMG

SEQ ID NO: 545 - protein, 5 aa, Artificial
  CDR sequence
IDVMG

SEQ ID NO: 546 - protein, 5 aa, Artificial
  CDR sequence
DYAIG

SEQ ID NO: 547 - protein, 5 aa, Artificial
  CDR sequence
MYGMR

SEQ ID NO: 548 - protein, 5 aa, Artificial
  CDR sequence
SAAMG

SEQ ID NO: 549 - protein, 5 aa, Artificial
  CDR sequence
DRAIA

SEQ ID NO: 550 - protein, 5 aa, Artificial
  CDR sequence
INAMA

SEQ ID NO: 551 - protein, 14 aa, Artificial
  Framework sequence
WVRRAPGKGLEWVS

SEQ ID NO: 552 - protein, 14 aa, Artificial
  Framework sequence
WVRQAPGKGLEWVS

SEQ ID NO: 553 - protein, 14 aa, Artificial
  Framework sequence
WVRQAPGKGLEWVS

SEQ ID NO: 554 - protein, 14 aa, Artificial
  Framework sequence
WVRQAPGKGLEWVS

SEQ ID NO: 555 - protein, 14 aa, Artificial
  Framework sequence
WVRQAPGKGLEWVS

SEQ ID NO: 556 - protein, 14 aa, Artificial
  Framework sequence
WVRQAPGKGLEWVS

SEQ ID NO: 557 - protein, 14 aa, Artificial
  Framework sequence
WVRQAPGKGLEWVS

SEQ ID NO: 558 - protein, 14 aa, Artificial
  Framework sequence
WYRQAPGKQRDLVA

SEQ ID NO: 559 - protein, 14 aa, Artificial
  Framework sequence
WVRQAPGKGLEWVS

SEQ ID NO: 560 - protein, 14 aa, Artificial
  Framework sequence
WVRQAPGKGLEWVS

SEQ ID NO: 561 - protein, 14 aa, Artificial
  Framework sequence
WVRQAPGKELEWIS

SEQ ID NO: 562 - protein, 14 aa, Artificial
  Framework sequence
WVRQAPGKGLEWVS

SEQ ID NO: 563 - protein, 14 aa, Artificial
  Framework sequence
WVRQAPGKGLEWVS

SEQ ID NO: 564 - protein, 14 aa, Artificial
  Framework sequence
WVRQAPGKGLEWVS

SEQ ID NO: 565 - protein, 14 aa, Artificial
  Framework sequence
WVRQAPGKGFEWVS

SEQ ID NO: 566 - protein, 14 aa, Artificial
  Framework sequence
WVRQAPGKGLEWVS

SEQ ID NO: 567 - protein, 14 aa, Artificial
  Framework sequence
WVRQAPGKGLEWVS

SEQ ID NO: 568 - protein, 14 aa, Artificial
  Framework sequence
WVRQAPGKGLEWVS

SEQ ID NO: 569 - protein, 14 aa, Artificial
  Framework sequence
WVRQAPGKGLEWVS

SEQ ID NO: 570 - protein, 14 aa, Artificial
  Framework sequence
WVRQAPGKGLEWVS

SEQ ID NO: 571 - protein, 14 aa, Artificial
  Framework sequence
WVRQAPGKGLEWVS

SEQ ID NO: 572 - protein, 14 aa, Artificial
  Framework sequence
WVRQAPGKGLEWVS

SEQ ID NO: 573 - protein, 14 aa, Artificial
  Framework sequence
WVRQAPGKGLEWVS

SEQ ID NO: 574 - protein, 14 aa, Artificial
  Framework sequence
WVRQAPGKGLEWVS

SEQ ID NO: 575 - protein, 14 aa, Artificial
  Framework sequence
WVRQAPGKGLEWVS

SEQ ID NO: 576 - protein, 14 aa, Artificial
  Framework sequence
WVRQAPGKGLEWVS

SEQ ID NO: 577 - protein, 14 aa, Artificial
  Framework sequence
WVRQAPGKGLEWVS

SEQ ID NO: 578 - protein, 14 aa, Artificial
  Framework sequence
WVRQAPGKGLEWVS

SEQ ID NO: 579 - protein, 14 aa, Artificial
  Framework sequence
WVRQAPGKGLEWVS

SEQ ID NO: 580 - protein, 14 aa, Artificial
  Framework sequence
WVRQAPGKGLEWVS

SEQ ID NO: 581 - protein, 14 aa, Artificial
  Framework sequence
WVRQAPGKGLEWVS

SEQ ID NO: 582 - protein, 14 aa, Artificial
  Framework sequence
WVRQAPGKGLEWVS

SEQ ID NO: 583 - protein, 14 aa, Artificial
  Framework sequence
WVRQAPGKGLEWVS

SEQ ID NO: 584 - protein, 14 aa, Artificial
  Framework sequence
WVRQAPGKGLEWVS

SEQ ID NO: 585 - protein, 14 aa, Artificial
  Framework sequence
WVRQAPGKGLEWVS

SEQ ID NO: 586 - protein, 14 aa, Artificial
  Framework sequence
WVRQAPGKGLEWIS

SEQ ID NO: 587 - protein, 14 aa, Artificial
  Framework sequence
WVRQAPGKGLEWIS

SEQ ID NO: 588 - protein, 14 aa, Artificial
  Framework sequence
WVRQAPGKGLEWVS

SEQ ID NO: 589 - protein, 14 aa, Artificial
  Framework sequence
WVRQAPGKGLEWIS

SEQ ID NO: 590 - protein, 14 aa, Artificial
  Framework sequence
WVRQVPGKGLEWVS

SEQ ID NO: 591 - protein, 14 aa, Artificial
  Framework sequence
WVRQAPGKGLEWVS

SEQ ID NO: 592 - protein, 14 aa, Artificial
  Framework sequence
WVRQAPGKGLEWIS

SEQ ID NO: 593 - protein, 14 aa, Artificial
  Framework sequence
WVRQAPGKGLEWVS

SEQ ID NO: 594 - protein, 14 aa, Artificial
  Framework sequence
WVRQASGKGLEWVS

SEQ ID NO: 595 - protein, 14 aa, Artificial
  Framework sequence
WVRQAPGKGLEWVS

SEQ ID NO: 596 - protein, 14 aa, Artificial
  Framework sequence
WVRQAPGKGLEWVS

SEQ ID NO: 597 - protein, 14 aa, Artificial
  Framework sequence
WVRQAPGKGLEWVS

SEQ ID NO: 598 - protein, 14 aa, Artificial
  Framework sequence
WVRQAPGKGLEWVS

SEQ ID NO: 599 - protein, 14 aa, Artificial
  Framework sequence
WVRQAPGKGLEWVS

SEQ ID NO: 600 - protein, 14 aa, Artificial
  Framework sequence
WVRQAPGKGLEWVS

SEQ ID NO: 601 - protein, 14 aa, Artificial
  Framework sequence
WVRQAPGKGLEWVS

SEQ ID NO: 602 - protein, 14 aa, Artificial
  Framework sequence
WVRQAPGKGLEWVS

SEQ ID NO: 603 - protein, 14 aa, Artificial
  Framework sequence
WVRQAPGKGLEWVS

SEQ ID NO: 604 - protein, 14 aa, Artificial
  Framework sequence
WVRQAPGKGLEWVS

SEQ ID NO: 605 - protein, 14 aa, Artificial
  Framework sequence
WVRQAPGKGLEWVS

SEQ ID NO: 606 - protein, 14 aa, Artificial
  Framework sequence
WVRQASGKGLEWVS

SEQ ID NO: 607 - protein, 14 aa, Artificial
  Framework sequence
WVRQAPGKGLEWVS

SEQ ID NO: 608 - protein, 14 aa, Artificial
  Framework sequence
WVRQAPGKGLEWVS

SEQ ID NO: 609 - protein, 14 aa, Artificial
  Framework sequence
WVRQAPGKGLEWVS

SEQ ID NO: 610 - protein, 14 aa, Artificial
  Framework sequence
WVRQTPGKGLEWVS

SEQ ID NO: 611 - protein, 14 aa, Artificial
  Framework sequence
WVRQVPGKGLEWVS

SEQ ID NO: 612 - protein, 14 aa, Artificial
  Framework sequence
WYRQAPGKQRELVA

SEQ ID NO: 613 - protein, 14 aa, Artificial
  Framework sequence
WFRQSPGKERDLVA

SEQ ID NO: 614 - protein, 14 aa, Artificial
  Framework sequence
WYRQAPGKQRELVA

SEQ ID NO: 615 - protein, 14 aa, Artificial
  Framework sequence
WFRQVPGKEREFVA

SEQ ID NO: 616 - protein, 14 aa, Artificial
  Framework sequence
WFRQAPGKEREFVA

SEQ ID NO: 617 - protein, 14 aa, Artificial
  Framework sequence
WFRQAPGKDREFVA

SEQ ID NO: 618 - protein, 14 aa, Artificial
  Framework sequence
WFRQAPGKEREFVA

SEQ ID NO: 619 - protein, 14 aa, Artificial
  Framework sequence
WFRQAPGKDREFVA

SEQ ID NO: 620 - protein, 14 aa, Artificial
  Framework sequence
WFRQAPGKERAFVA

SEQ ID NO: 621 - protein, 14 aa, Artificial
  Framework sequence
WFRQAPGKERAFVA

SEQ ID NO: 622 - protein, 14 aa, Artificial
  Framework sequence
WFRQAPGKERAFVA

SEQ ID NO: 623 - protein, 14 aa, Artificial
  Framework sequence
WFRQAPGKERAFVA

SEQ ID NO: 624 - protein, 14 aa, Artificial
  Framework sequence
WFRQAPGKEREFVA

SEQ ID NO: 625 - protein, 14 aa, Artificial
  Framework sequence
WFRQAPGKEREFVA

SEQ ID NO: 626 - protein, 14 aa, Artificial
  Framework sequence
WFRQAPGKEREFVA

SEQ ID NO: 627 - protein, 14 aa, Artificial
  Framework sequence
WYRQAPGQQREWVA

SEQ ID NO: 628 - protein, 14 aa, Artificial
  Framework sequence
WFRQAPGKEREFVA

SEQ ID NO: 629 - protein, 14 aa, Artificial
  Framework sequence
WFRQASGKEREGVS

SEQ ID NO: 630 - protein, 14 aa, Artificial
  Framework sequence
WVRQAPGKGLEWVS

SEQ ID NO: 631 - protein, 14 aa, Artificial
  Framework sequence
WFRQAPGKEREFVA

SEQ ID NO: 632 - protein, 14 aa, Artificial
  Framework sequence
WYRQAPGKQRDWVA

SEQ ID NO: 633 - protein, 14 aa, Artificial
  Framework sequence
WYRQAPGKQRDWVA

SEQ ID NO: 634 - protein, 14 aa, Artificial
  Framework sequence
WYRQAPGKQRDWVA

SEQ ID NO: 635 - protein, 14 aa, Artificial
  Framework sequence
WYRQAPGKQRDWVA

SEQ ID NO: 636 - protein, 14 aa, Artificial
  Framework sequence
WYRQAQGKQRDWVA

SEQ ID NO: 637 - protein, 14 aa, Artificial
  Framework sequence
WYRQAPGKPRDWVA

SEQ ID NO: 638 - protein, 14 aa, Artificial
  Framework sequence
WYRQPPGNERDWVA

SEQ ID NO: 639 - protein, 14 aa, Artificial
  Framework sequence
WYRQTPGKSRDWVA

SEQ ID NO: 640 - protein, 14 aa, Artificial
  Framework sequence
WYRQTPGNQRDWLA

SEQ ID NO: 641 - protein, 14 aa, Artificial
  Framework sequence
WYRQAPGKQRDWVA

SEQ ID NO: 642 - protein, 14 aa, Artificial
  Framework sequence
WYRQTPGNQRDWLA

SEQ ID NO: 643 - protein, 14 aa, Artificial
  Framework sequence
WYRQTPGNQRDWLA

SEQ ID NO: 644 - protein, 14 aa, Artificial
  Framework sequence
WYRQAPGKTRDWVA

SEQ ID NO: 645 - protein, 14 aa, Artificial
  Framework sequence
WYRQGPGKQRELVA

SEQ ID NO: 646 - protein, 14 aa, Artificial
  Framework sequence
WYRQAPGQQREWVA

SEQ ID NO: 647 - protein, 14 aa, Artificial
  Framework sequence
WYRQAPGQQREWVA

SEQ ID NO: 648 - protein, 14 aa, Artificial
  Framework sequence
WYRQAPGKQRDWVA

SEQ ID NO: 649 - protein, 14 aa, Artificial
  Framework sequence
WYRQAPGKQRDWVA

SEQ ID NO: 650 - protein, 14 aa, Artificial
  Framework sequence
WYRQPPGKQRDWVG

SEQ ID NO: 651 - protein, 14 aa, Artificial
  Framework sequence
WYRQAPGKQRDWVA

SEQ ID NO: 652 - protein, 14 aa, Artificial
  Framework sequence
WYRQAPGKQRDWVA

SEQ ID NO: 653 - protein, 14 aa, Artificial
  Framework sequence
WYRQAPGKQRDWVA

SEQ ID NO: 654 - protein, 14 aa, Artificial
  Framework sequence
WYRQAPGKQRDWVA

SEQ ID NO: 655 - protein, 14 aa, Artificial
  Framework sequence
WYRQAPGRQRDWVA

SEQ ID NO: 656 - protein, 14 aa, Artificial
  Framework sequence
WYRQAPGRQRDWVA

SEQ ID NO: 657 - protein, 14 aa, Artificial
  Framework sequence
WYRQAPGKQRDWGA

SEQ ID NO: 658 - protein, 14 aa, Artificial
  Framework sequence
WYRQAPGKQRDWVA

SEQ ID NO: 659 - protein, 14 aa, Artificial
  Framework sequence
WYRQAPGKQRDWVA

SEQ ID NO: 660 - protein, 14 aa, Artificial
  Framework sequence
WYRQAPGKQRDWVA

SEQ ID NO: 661 - protein, 14 aa, Artificial
  Framework sequence
WYRQAPGRQRDWVA

SEQ ID NO: 662 - protein, 14 aa, Artificial
  Framework sequence
WYRQAPGRQRDWVA

SEQ ID NO: 663 - protein, 14 aa, Artificial
  Framework sequence
WYRQAPGRQRDWVA

SEQ ID NO: 664 - protein, 14 aa, Artificial
  Framework sequence
WFRQAPGKERECVA

SEQ ID NO: 665 - protein, 14 aa, Artificial
  Framework sequence
WFRQAPGKERECVA

SEQ ID NO: 666 - protein, 14 aa, Artificial
  Framework sequence
WYRQAPGKQREFVA

SEQ ID NO: 667 - protein, 14 aa, Artificial
  Framework sequence
WYRQAPGRQRDWVA

SEQ ID NO: 668 - protein, 14 aa, Artificial
  Framework sequence
WFRQAPGKEREEVS

SEQ ID NO: 669 - protein, 14 aa, Artificial
  Framework sequence
WYRQAPEKQRELVA

SEQ ID NO: 670 - protein, 14 aa, Artificial
  Framework sequence
WYRQTPGKQREFVA

SEQ ID NO: 671 - protein, 14 aa, Artificial
  Framework sequence
WYRQTPGKQREFVA

SEQ ID NO: 672 - protein, 14 aa, Artificial
  Framework sequence
WYRQTPGKQREFVA

SEQ ID NO: 673 - protein, 14 aa, Artificial
  Framework sequence
WYRQTPGKQREFVA

SEQ ID NO: 674 - protein, 14 aa, Artificial
  Framework sequence
WYRQTPGNQREFVA

SEQ ID NO: 675 - protein, 14 aa, Artificial
  Framework sequence
WYRQPPGNQREWVA

SEQ ID NO: 676 - protein, 14 aa, Artificial
  Framework sequence
WYRQAPGEQREWVA

SEQ ID NO: 677 - protein, 14 aa, Artificial
  Framework sequence
WYRQAPGKQRDWVA

SEQ ID NO: 678 - protein, 14 aa, Artificial
  Framework sequence
WYRQAPGKQRDWVA

SEQ ID NO: 679 - protein, 14 aa, Artificial
  Framework sequence
WYRQAPGKQRDWVA

SEQ ID NO: 680 - protein, 14 aa, Artificial
  Framework sequence
WYRQAPGNQRDWVA

SEQ ID NO: 681 - protein, 14 aa, Artificial
  Framework sequence
WYRQAPGKQRDWVA

SEQ ID NO: 682 - protein, 14 aa, Artificial
  Framework sequence
WYRQAPGKQRDWVA

SEQ ID NO: 683 - protein, 14 aa, Artificial
  Framework sequence
WVRQAPGKGLEWVS

SEQ ID NO: 684 - protein, 14 aa, Artificial
  Framework sequence
WYRQAPGKQRDLVA

SEQ ID NO: 685 - protein, 14 aa, Artificial
  Framework sequence
WYRQAPGKQRDLVA

SEQ ID NO: 686 - protein, 14 aa, Artificial
  Framework sequence
WYRQAPGKQRELVA

SEQ ID NO: 687 - protein, 14 aa, Artificial
  Framework sequence
WYRQAPGKERELVA

SEQ ID NO: 688 - protein, 14 aa, Artificial
  Framework sequence
WYRQFPGKERELVA

SEQ ID NO: 689 - protein, 14 aa, Artificial
  Framework sequence
WYRQAPGNERILVA

SEQ ID NO: 690 - protein, 14 aa, Artificial
  Framework sequence
WYRQAPGKQRELVT

SEQ ID NO: 691 - protein, 14 aa, Artificial
  Framework sequence
WFRQAPGDGREFVA

SEQ ID NO: 692 - protein, 14 aa, Artificial
  Framework sequence
WVRQATGKGLEWVS

SEQ ID NO: 693 - protein, 14 aa, Artificial
  Framework sequence
WVRQAPGKGLEWVS

SEQ ID NO: 694 - protein, 14 aa, Artificial
  Framework sequence
WYRQSPGKQRELVA

SEQ ID NO: 695 - protein, 14 aa, Artificial
  Framework sequence
WYRQAPGKQRELVA

SEQ ID NO: 696 - protein, 14 aa, Artificial
  Framework sequence
WYRQAPGKQRELVA

SEQ ID NO: 697 - protein, 14 aa, Artificial
  Framework sequence
WVRQAPGKGLEWVS

SEQ ID NO: 698 - protein, 14 aa, Artificial
  Framework sequence
WVRQAPGKGLEWVS

SEQ ID NO: 699 - protein, 14 aa, Artificial
  Framework sequence
WFRQAPGKEREGVS

SEQ ID NO: 700 - protein, 14 aa, Artificial
  Framework sequence
WVRQAPGKGLEWVS

SEQ ID NO: 701 - protein, 14 aa, Artificial
  Framework sequence
WYRQPPGNQREWVA

SEQ ID NO: 702 - protein, 14 aa, Artificial
  Framework sequence
WYRQPPGNQREWVA

SEQ ID NO: 703 - protein, 14 aa, Artificial
  Framework sequence
WYRQPPGNQREWVA

SEQ ID NO: 704 - protein, 14 aa, Artificial
  Framework sequence
WYRQPPGNQREWVA

SEQ ID NO: 705 - protein, 14 aa, Artificial
  Framework sequence
WFRQAPGKEREFVA

SEQ ID NO: 706 - protein, 14 aa, Artificial
  Framework sequence
WVRQAPGKGPEWVS

SEQ ID NO: 707 - protein, 14 aa, Artificial
  Framework sequence
WFRQAPGKEREFVA

SEQ ID NO: 708 - protein, 14 aa, Artificial
  Framework sequence
WFRQAPGTEREFIA

SEQ ID NO: 709 - protein, 14 aa, Artificial
  Framework sequence
WFRQAPGTEREFIA

SEQ ID NO: 710 - protein, 14 aa, Artificial
  Framework sequence
WFRQAPGKEREFVG

SEQ ID NO: 711 - protein, 14 aa, Artificial
  Framework sequence
WFRQAPGKERAFVA

SEQ ID NO: 712 - protein, 14 aa, Artificial
  Framework sequence
WFRQAPGKEREFVA

SEQ ID NO: 713 - protein, 14 aa, Artificial
  Framework sequence
WFRQAPGKEREFVA

SEQ ID NO: 714 - protein, 14 aa, Artificial
  Framework sequence
WFRQAPGKEREFVA

SEQ ID NO: 715 - protein, 14 aa, Artificial
  Framework sequence
WFRQAPGKEREFVA

SEQ ID NO: 716 - protein, 14 aa, Artificial
  Framework sequence
WYRQAPGKQRELAA

SEQ ID NO: 717 - protein, 14 aa, Artificial
  Framework sequence
WFRQAPGKEREFVA

SEQ ID NO: 718 - protein, 14 aa, Artificial
  Framework sequence
WFRQAPGKERDFVA

SEQ ID NO: 719 - protein, 14 aa, Artificial
  Framework sequence
WFRQTPGKEREFVA

SEQ ID NO: 720 - protein, 14 aa, Artificial
  Framework sequence
WYRQRPGKPREWVG

SEQ ID NO: 721 - protein, 14 aa, Artificial
  Framework sequence
WFRQAPGKEREFVA

SEQ ID NO: 722 - protein, 14 aa, Artificial
  Framework sequence
WFRQAPGKERELIA

SEQ ID NO: 723 - protein, 14 aa, Artificial
  Framework sequence
WFRQAPGKEREFVA

SEQ ID NO: 724 - protein, 14 aa, Artificial
  Framework sequence
WFRQAPGKERDFVA

SEQ ID NO: 725 - protein, 14 aa, Artificial
  Framework sequence
WFRQAPGKEREFVT

SEQ ID NO: 726 - protein, 14 aa, Artificial
  Framework sequence
WYRQAPGKQREFVA

SEQ ID NO: 727 - protein, 14 aa, Artificial
  Framework sequence
WYRQAPGKQRERVA

SEQ ID NO: 728 - protein, 14 aa, Artificial
  Framework sequence
WFRRAPGKEREFVA

SEQ ID NO: 729 - protein, 14 aa, Artificial
  Framework sequence
WFRQAPEKEREFVA

SEQ ID NO: 730 - protein, 14 aa, Artificial
  Framework sequence
WFRQAPGKEREFVA

SEQ ID NO: 731 - protein, 14 aa, Artificial
  Framework sequence
WFRQAPGKEREFVA

SEQ ID NO: 732 - protein, 14 aa, Artificial
  Framework sequence
WFRQAPGKEREFVA

SEQ ID NO: 733 - protein, 14 aa, Artificial
  Framework sequence
WFRQAPGKEREFVA

SEQ ID NO: 734 - protein, 14 aa, Artificial
  Framework sequence
WFRQAPGNERELVS

SEQ ID NO: 735 - protein, 14 aa, Artificial
  Framework sequence
WFRQAPGKEREFVA

SEQ ID NO: 736 - protein, 14 aa, Artificial
  Framework sequence
WFRQAPGKDREFVS

SEQ ID NO: 737 - protein, 14 aa, Artificial
  Framework sequence
WFRQAPGKEREFVA

SEQ ID NO: 738 - protein, 14 aa, Artificial
  Framework sequence
WFRQAPGKERDFVA

SEQ ID NO: 739 - protein, 14 aa, Artificial
  Framework sequence
WFRQAPGKEREFVA

SEQ ID NO: 740 - protein, 14 aa, Artificial
  Framework sequence
WFRQAPGKEREFVA

SEQ ID NO: 741 - protein, 14 aa, Artificial
  Framework sequence
WFRQAPGKEREFVA

SEQ ID NO: 742 - protein, 14 aa, Artificial
  Framework sequence
WFRQAPGKEREFVA

SEQ ID NO: 743 - protein, 14 aa, Artificial
  Framework sequence
WFRQAPGKEREFVA

SEQ ID NO: 744 - protein, 14 aa, Artificial
  Framework sequence
WFRQAPGTEREFVA

SEQ ID NO: 745 - protein, 14 aa, Artificial
  Framework sequence
WFRQAPGKEREFVA

SEQ ID NO: 746 - protein, 14 aa, Artificial
  Framework sequence
WVRQAPGKGLEWVS

SEQ ID NO: 747 - protein, 14 aa, Artificial
  Framework sequence
WFRQSPGEEREFLA

SEQ ID NO: 748 - protein, 14 aa, Artificial
  Framework sequence
WFRQAPGKEREFVA

SEQ ID NO: 749 - protein, 14 aa, Artificial
  Framework sequence
WFRQAPGKAREFVA

SEQ ID NO: 750 - protein, 14 aa, Artificial
  Framework sequence
WFRQTPGKEREFVA

SEQ ID NO: 751 - protein, 14 aa, Artificial
  Framework sequence
WFRQAPGKEREFVS

SEQ ID NO: 752 - protein, 14 aa, Artificial
  Framework sequence
WFRQAPGKEREFVA

SEQ ID NO: 753 - protein, 14 aa, Artificial
  Framework sequence
WFRQAPGKEREFVT

SEQ ID NO: 754 - protein, 14 aa, Artificial
  Framework sequence
WFRQAPGKGRESVA

SEQ ID NO: 755 - protein, 14 aa, Artificial
  Framework sequence
WFRQAPGKERESVA

SEQ ID NO: 756 - protein, 14 aa, Artificial
  Framework sequence
WFRQAPGKEREFVA

SEQ ID NO: 757 - protein, 14 aa, Artificial
  Framework sequence
WFRQAPGKERESVA

SEQ ID NO: 758 - protein, 14 aa, Artificial
  Framework sequence
WFRQAPGNEREFVA

SEQ ID NO: 759 - protein, 14 aa, Artificial
  Framework sequence
WYRPAPGKQRELVA

SEQ ID NO: 760 - protein, 14 aa, Artificial
  Framework sequence
WFRQAPGKEREFVV

SEQ ID NO: 761 - protein, 14 aa, Artificial
  Framework sequence
WYRQAPGKQRELVA

SEQ ID NO: 762 - protein, 14 aa, Artificial
  Framework sequence
WFRQAPGKEREFVA

SEQ ID NO: 763 - protein, 14 aa, Artificial
  Framework sequence
WFRQAPGKEREFVA

SEQ ID NO: 764 - protein, 14 aa, Artificial
  Framework sequence
WYRLAPGNQRELVA

SEQ ID NO: 765 - protein, 14 aa, Artificial
  Framework sequence
WYRQAPGNQREFVA

SEQ ID NO: 766 - protein, 14 aa, Artificial
  Framework sequence
WYRQAPGKQREFVA

SEQ ID NO: 767 - protein, 14 aa, Artificial
  Framework sequence
WYRQAPGEQRELVA

SEQ ID NO: 768 - protein, 14 aa, Artificial
  Framework sequence
WYRQGPGKEREFVA

SEQ ID NO: 769 - protein, 14 aa, Artificial
  Framework sequence
WFRQAPGKEREFVA

SEQ ID NO: 770 - protein, 14 aa, Artificial
  Framework sequence
WFRQAPGEEREFVT

SEQ ID NO: 771 - protein, 14 aa, Artificial
  Framework sequence
WFRQAPGKEREFRE

SEQ ID NO: 772 - protein, 14 aa, Artificial
  Framework sequence
WFRQAPGTERELVA

SEQ ID NO: 773 - protein, 14 aa, Artificial
  Framework sequence
WYRQAPGNQRELVA

SEQ ID NO: 774 - protein, 14 aa, Artificial
  Framework sequence
WFRQAPGKEREFVS

SEQ ID NO: 775 - protein, 14 aa, Artificial
  Framework sequence
WVRQAPGKAREFVA

SEQ ID NO: 776 - protein, 14 aa, Artificial
  Framework sequence
WVRQAPGKAREFVA

SEQ ID NO: 777 - protein, 14 aa, Artificial
  Framework sequence
WFRQALGQGREFVA

SEQ ID NO: 778 - protein, 14 aa, Artificial
  Framework sequence
WFRQAPGKERESVA

SEQ ID NO: 779 - protein, 14 aa, Artificial
  Framework sequence
WFRQAPGKEREFVA

SEQ ID NO: 780 - protein, 14 aa, Artificial
  Framework sequence
WFRQAPGKEREFVA

SEQ ID NO: 781 - protein, 14 aa, Artificial
  Framework sequence
WYRQGPGQQLELVA

SEQ ID NO: 782 - protein, 14 aa, Artificial
  Framework sequence
WFRQAPGKEREFVA

SEQ ID NO: 783 - protein, 14 aa, Artificial
  Framework sequence
WFRQAPGKEREFVG

SEQ ID NO: 784 - protein, 14 aa, Artificial
  Framework sequence
WYRQAPGKQREFVA

SEQ ID NO: 785 - protein, 14 aa, Artificial
  Framework sequence
WYRQAPGNQRDLVA

SEQ ID NO: 786 - protein, 14 aa, Artificial
  Framework sequence
WFRQAPGKEREFVS

SEQ ID NO: 787 - protein, 14 aa, Artificial
  Framework sequence
WFRQAPGKEREFVA

SEQ ID NO: 788 - protein, 14 aa, Artificial
  Framework sequence
WFRQAPEKEREAVS

SEQ ID NO: 789 - protein, 14 aa, Artificial
  Framework sequence
WFRQAPGKGREFVA

SEQ ID NO: 790 - protein, 14 aa, Artificial
  Framework sequence
WFRQAPGKEREFVA

SEQ ID NO: 791 - protein, 14 aa, Artificial
  Framework sequence
WLRQAPGKEREFVA

SEQ ID NO: 792 - protein, 14 aa, Artificial
  Framework sequence
WFRQAPGKVREFVA

SEQ ID NO: 793 - protein, 14 aa, Artificial
  Framework sequence
WFRQAPGKVREFVA

SEQ ID NO: 794 - protein, 14 aa, Artificial
  Framework sequence
WFRQGPGKRRELVA

SEQ ID NO: 795 - protein, 14 aa, Artificial
  Framework sequence
WFRQSPGKERESVA

SEQ ID NO: 796 - protein, 14 aa, Artificial
  Framework sequence
WFRQGPGKEREFAA

SEQ ID NO: 797 - protein, 14 aa, Artificial
  Framework sequence
WFRQAPGKEREFIA

SEQ ID NO: 798 - protein, 14 aa, Artificial
  Framework sequence
WFRQAPRKEREFVA

SEQ ID NO: 799 - protein, 14 aa, Artificial
  Framework sequence
WFRQAPGSERDFVA

SEQ ID NO: 800 - protein, 14 aa, Artificial
  Framework sequence
WSREAPGKRRELVA

SEQ ID NO: 801 - protein, 14 aa, Artificial
  Framework sequence
WFRQAPGKEREFVA

SEQ ID NO: 802 - protein, 14 aa, Artificial
  Framework sequence
WFRQAPGKEREFVA

SEQ ID NO: 803 - protein, 14 aa, Artificial
  Framework sequence
WFRQAPGKEREFVA

SEQ ID NO: 804 - protein, 14 aa, Artificial
  Framework sequence
WYRQAPGNQRELVA

SEQ ID NO: 805 - protein, 14 aa, Artificial
  Framework sequence
WFRQAPGKEREFVA

SEQ ID NO: 806 - protein, 14 aa, Artificial
  Framework sequence
WFRQAPGKAREFVA

SEQ ID NO: 807 - protein, 14 aa, Artificial
  Framework sequence
WFRQAPGKERGFVA

SEQ ID NO: 808 - protein, 14 aa, Artificial
  Framework sequence
WFRQAPGKEREVVA

SEQ ID NO: 809 - protein, 14 aa, Artificial
  Framework sequence
WYRKAPGKQREVVA

SEQ ID NO: 810 - protein, 14 aa, Artificial
  Framework sequence
WYRQAPGNQRELVA

SEQ ID NO: 811 - protein, 14 aa, Artificial
  Framework sequence
WFRQAPGKEREFVS

SEQ ID NO: 812 - protein, 14 aa, Artificial
  Framework sequence
WFRQAPGKEREFVA

SEQ ID NO: 813 - protein, 14 aa, Artificial
  Framework sequence
WFRQSPGKEREFVG

SEQ ID NO: 814 - protein, 14 aa, Artificial
  Framework sequence
WFRQAPGKAREFVA

SEQ ID NO: 815 - protein, 14 aa, Artificial
  Framework sequence
WFRQAPGKEREFVA

SEQ ID NO: 816 - protein, 14 aa, Artificial
  Framework sequence
WFRQAPGEEREFVA

SEQ ID NO: 817 - protein, 14 aa, Artificial
  Framework sequence
WFRRAPGKEREHVA

SEQ ID NO: 818 - protein, 14 aa, Artificial
  Framework sequence
WHRQVSGKERELVA

SEQ ID NO: 819 - protein, 14 aa, Artificial
  Framework sequence
WHRQVPGKQRELVA

SEQ ID NO: 820 - protein, 14 aa, Artificial
  Framework sequence
WHRQAPGKERELVS

SEQ ID NO: 821 - protein, 14 aa, Artificial
  Framework sequence
WFRQAPGKEREGVS

SEQ ID NO: 822 - protein, 14 aa, Artificial
  Framework sequence
WVRQAPGKGPERVS

SEQ ID NO: 823 - protein, 14 aa, Artificial
  Framework sequence
WFRQGPGKEREFVA

SEQ ID NO: 824 - protein, 14 aa, Artificial
  Framework sequence
WFRQAPGKAREGVS

SEQ ID NO: 825 - protein, 14 aa, Artificial
  Framework sequence
WYRQAPGNERELVA

SEQ ID NO: 826 - protein, 17 aa, Artificial
  CDR sequence
SINWSGTHTDYADSVKG

SEQ ID NO: 827 - protein, 17 aa, Artificial
  CDR sequence
SINWSGTHTDYADSVKG

SEQ ID NO: 828 - protein, 17 aa, Artificial
  CDR sequence
SINWSGTHTDYTDPVKG

SEQ ID NO: 829 - protein, 17 aa, Artificial
  CDR sequence
SINWSGTHTDYADSVKG

SEQ ID NO: 830 - protein, 17 aa, Artificial
  CDR sequence
SINWSGTHTDYADSVKG

SEQ ID NO: 831 - protein, 17 aa, Artificial
  CDR sequence
SINWSGTHTDYADSVKG

SEQ ID NO: 832 - protein, 17 aa, Artificial
  CDR sequence
SINWSGTHTDYADSVKG

SEQ ID NO: 833 - protein, 16 aa, Artificial
  CDR sequence
SIDSSGGTNYADSVKG

SEQ ID NO: 834 - protein, 17 aa, Artificial
  CDR sequence
SINWSGTHTDYADSVKG

SEQ ID NO: 835 - protein, 17 aa, Artificial
  CDR sequence
SINWSGTHTDYADSVKG

SEQ ID NO: 836 - protein, 17 aa, Artificial
  CDR sequence
SINWSGTHTDYADSVKG

SEQ ID NO: 837 - protein, 17 aa, Artificial
  CDR sequence
SINWSGTHTDYADSVKG

SEQ ID NO: 838 - protein, 17 aa, Artificial
  CDR sequence
SINWSGTHTDYADSVKG

SEQ ID NO: 839 - protein, 17 aa, Artificial
  CDR sequence
SINWSGTHTDYADSVKG

SEQ ID NO: 840 - protein, 17 aa, Artificial
  CDR sequence
SINWSGTHTDYADSVKG

SEQ ID NO: 841 - protein, 17 aa, Artificial
  CDR sequence
SINWSGTHTDYADSVKG

SEQ ID NO: 842 - protein, 17 aa, Artificial
  CDR sequence
SINWSGTHTDYADSVKG

SEQ ID NO: 843 - protein, 17 aa, Artificial
  CDR sequence
SINWSGTHTDYADSVRG

SEQ ID NO: 844 - protein, 17 aa, Artificial
  CDR sequence
SINWSGTHTDYTDSVKG

SEQ ID NO: 845 - protein, 17 aa, Artificial
  CDR sequence
SINWNVTHTDYAYSVKG

SEQ ID NO: 846 - protein, 17 aa, Artificial
  CDR sequence
SINWSGTHTDCADSVKG

SEQ ID NO: 847 - protein, 17 aa, Artificial
  CDR sequence
SINWSGTHTDYADSVKG

SEQ ID NO: 848 - protein, 17 aa, Artificial
  CDR sequence
SINWSGTHTDYADSVKG

SEQ ID NO: 849 - protein, 17 aa, Artificial
  CDR sequence
SINWSGTHTDYADSVKG

SEQ ID NO: 850 - protein, 17 aa, Artificial
  CDR sequence
SINWSGTHTDYADSVKG

SEQ ID NO: 851 - protein, 17 aa, Artificial
  CDR sequence
SINWSGTHTDYADSVKG

SEQ ID NO: 852 - protein, 17 aa, Artificial
  CDR sequence
SINWSGTHTDYADSVKG

SEQ ID NO: 853 - protein, 17 aa, Artificial
  CDR sequence
SINWNGTHTDYAYSVKG

SEQ ID NO: 854 - protein, 17 aa, Artificial
  CDR sequence
SINWSGTHTDYADSVKG

SEQ ID NO: 855 - protein, 17 aa, Artificial
  CDR sequence
SINWSGTHTDYADSVKG

SEQ ID NO: 856 - protein, 17 aa, Artificial
  CDR sequence
SINWSGTHTDYADSVKG

SEQ ID NO: 857 - protein, 17 aa, Artificial
  CDR sequence
AINWSGSHRNYADSVKG

SEQ ID NO: 858 - protein, 17 aa, Artificial
  CDR sequence
AINWSGTHRNYADSVKG

SEQ ID NO: 859 - protein, 17 aa, Artificial
  CDR sequence
AINWSGSHRNYADSVKG

SEQ ID NO: 860 - protein, 17 aa, Artificial
  CDR sequence
SINWSGSHRNYADSVKG

SEQ ID NO: 861 - protein, 17 aa, Artificial
  CDR sequence
SINWSGTHKDYADSVKG

SEQ ID NO: 862 - protein, 17 aa, Artificial
  CDR sequence
SINWSGTHTDYADSVKG

SEQ ID NO: 863 - protein, 17 aa, Artificial
  CDR sequence
SINWSGTHTDYTDSVKG

SEQ ID NO: 864 - protein, 17 aa, Artificial
  CDR sequence
SINWSGTHTDYADSVKG

SEQ ID NO: 865 - protein, 17 aa, Artificial
  CDR sequence
SINWSGTHTDYADSVKG

SEQ ID NO: 866 - protein, 17 aa, Artificial
  CDR sequence
SINWSGTHTDYTDSVKG

SEQ ID NO: 867 - protein, 17 aa, Artificial
  CDR sequence
SINWSGTHTDYADSVKG

SEQ ID NO: 868 - protein, 17 aa, Artificial
  CDR sequence
SINWSGTHTDYADSVKG

SEQ ID NO: 869 - protein, 17 aa, Artificial
  CDR sequence
SINWSGTHTDYTDSVKG

SEQ ID NO: 870 - protein, 17 aa, Artificial
  CDR sequence
SINWSGTHTGYTDSVKG

SEQ ID NO: 871 - protein, 17 aa, Artificial
  CDR sequence
SINWSGTHTDYTDSVKG

SEQ ID NO: 872 - protein, 17 aa, Artificial
  CDR sequence
SINWSGTHTDYTGSVKG

SEQ ID NO: 873 - protein, 17 aa, Artificial
  CDR sequence
SINWSGTHTDYTDSVKG

SEQ ID NO: 874 - protein, 17 aa, Artificial
  CDR sequence
SINWSGTHTDYTDSVKG

SEQ ID NO: 875 - protein, 17 aa, Artificial
  CDR sequence
SINWSGTHTGYTDSVKG

SEQ ID NO: 876 - protein, 17 aa, Artificial
  CDR sequence
SINWSGTHTDYTDSVKG

SEQ ID NO: 877 - protein, 17 aa, Artificial
  CDR sequence
SINWSGTHTDYTDSVKG

SEQ ID NO: 878 - protein, 17 aa, Artificial
  CDR sequence
SINWSGTHTDYTDSVKG

SEQ ID NO: 879 - protein, 17 aa, Artificial
  CDR sequence
SINWSGTHTDYTDSVKG

SEQ ID NO: 880 - protein, 17 aa, Artificial
  CDR sequence
SINWSGTHTDCTDSVKG

SEQ ID NO: 881 - protein, 17 aa, Artificial
  CDR sequence
SINWSGTHTDYADSVKG

SEQ ID NO: 882 - protein, 17 aa, Artificial
  CDR sequence
SINWSGTHTDYTGSVKG

SEQ ID NO: 883 - protein, 17 aa, Artificial
  CDR sequence
SINWSGTHTDYTDSVKG

SEQ ID NO: 884 - protein, 17 aa, Artificial
  CDR sequence
SINWSGTHTDYTDSVKG

SEQ ID NO: 885 - protein, 17 aa, Artificial
  CDR sequence
SINWSGTHTDYTDSVKG

SEQ ID NO: 886 - protein, 17 aa, Artificial
  CDR sequence
SINWSGTHTDYADSVKG

SEQ ID NO: 887 - protein, 16 aa, Artificial
  CDR sequence
LISSIGDTYYADSVKG

SEQ ID NO: 888 - protein, 17 aa, Artificial
  CDR sequence
GIMWDGRSLFYADSVKG

SEQ ID NO: 889 - protein, 16 aa, Artificial
  CDR sequence
LISRVGVTSSADSVKG

SEQ ID NO: 890 - protein, 16 aa, Artificial
  CDR sequence
TINWSGVTAYADSVKG

SEQ ID NO: 891 - protein, 16 aa, Artificial
  CDR sequence
TINWSGVTAYADSIKG

SEQ ID NO: 892 - protein, 16 aa, Artificial
  CDR sequence
TINWSGVTAYADSIKG

SEQ ID NO: 893 - protein, 16 aa, Artificial
  CDR sequence
TINWSGATAYADSIKG

SEQ ID NO: 894 - protein, 16 aa, Artificial
  CDR sequence
TINWSGVTAYADSIKG

SEQ ID NO: 895 - protein, 16 aa, Artificial
  CDR sequence
TINWSGVTAYADSVKG

SEQ ID NO: 896 - protein, 16 aa, Artificial
  CDR sequence
TINWSGVNAYADSVKG

SEQ ID NO: 897 - protein, 16 aa, Artificial
  CDR sequence
TINWSGVNAYADSVKG

SEQ ID NO: 898 - protein, 16 aa, Artificial
  CDR sequence
TINWSGVTAYADSVKG

SEQ ID NO: 899 - protein, 16 aa, Artificial
  CDR sequence
TINWSGVTAYADSVKG

SEQ ID NO: 900 - protein, 16 aa, Artificial
  CDR sequence
TINWSGVTAYADSVKG

SEQ ID NO: 901 - protein, 16 aa, Artificial
  CDR sequence
TINWSGVTAYADSVKG

SEQ ID NO: 902 - protein, 16 aa, Artificial
  CDR sequence
AISGAGDINYADSVKG

SEQ ID NO: 903 - protein, 17 aa, Artificial
  CDR sequence
TISWNYGYTYYSDSVKG

SEQ ID NO: 904 - protein, 17 aa, Artificial
  CDR sequence
CITSSDGSTYYADSVKG

SEQ ID NO: 905 - protein, 17 aa, Artificial
  CDR sequence
AVDSGGGRTDYAHSVKG

SEQ ID NO: 906 - protein, 17 aa, Artificial
  CDR sequence
TISRGGSATYYADSLKG

SEQ ID NO: 907 - protein, 16 aa, Artificial
  CDR sequence
TISSHGLPVYADSVKG

SEQ ID NO: 908 - protein, 16 aa, Artificial
  CDR sequence
TIGTSGPPRYADSVKG

SEQ ID NO: 909 - protein, 16 aa, Artificial
  CDR sequence
TISSHGLPVYADSVKG

SEQ ID NO: 910 - protein, 16 aa, Artificial
  CDR sequence
TISARGMPAYEDSVKG

SEQ ID NO: 911 - protein, 16 aa, Artificial
  CDR sequence
TISSHGLPVYADSVKG

SEQ ID NO: 912 - protein, 15 aa, Artificial
  CDR sequence
TIRNGAPVYADSVKG

SEQ ID NO: 913 - protein, 15 aa, Artificial
  CDR sequence
TIRSGAPVYADSVKG

SEQ ID NO: 914 - protein, 15 aa, Artificial
  CDR sequence
TIRSGTPVYADSVKG

SEQ ID NO: 915 - protein, 16 aa, Artificial
  CDR sequence
TIGSSGTPAYADSVKG

SEQ ID NO: 916 - protein, 16 aa, Artificial
  CDR sequence
TIGTGGTPAYADSFKG

SEQ ID NO: 917 - protein, 16 aa, Artificial
  CDR sequence
TIGSSGTPAYADSVKG

SEQ ID NO: 918 - protein, 16 aa, Artificial
  CDR sequence
TIGSSGTPAYADSVKG

SEQ ID NO: 919 - protein, 16 aa, Artificial
  CDR sequence
TIGTHGTPLYADSVKG

SEQ ID NO: 920 - protein, 16 aa, Artificial
  CDR sequence
TVNDGGTTSYADSVKG

SEQ ID NO: 921 - protein, 16 aa, Artificial
  CDR sequence
AISGAGDINYADSVKG

SEQ ID NO: 922 - protein, 16 aa, Artificial
  CDR sequence
AISGAGDINYADSVKG

SEQ ID NO: 923 - protein, 16 aa, Artificial
  CDR sequence
TIAGDGSTVYADSMKG

SEQ ID NO: 924 - protein, 16 aa, Artificial
  CDR sequence
TIAGDGSTVYADSMKG

SEQ ID NO: 925 - protein, 16 aa, Artificial
  CDR sequence
TISSDGTANYADSVKG

SEQ ID NO: 926 - protein, 16 aa, Artificial
  CDR sequence
TSDSGGTTLYADSVKG

SEQ ID NO: 927 - protein, 16 aa, Artificial
  CDR sequence
TSGTGYGATYDDSVKG

SEQ ID NO: 928 - protein, 16 aa, Artificial
  CDR sequence
TIAGDGSTVYADSMKG

SEQ ID NO: 929 - protein, 16 aa, Artificial
  CDR sequence
TIGSDGTTIYADSVKG

SEQ ID NO: 930 - protein, 17 aa, Artificial
  CDR sequence
TIYSPSGSAVYADSVKG

SEQ ID NO: 931 - protein, 17 aa, Artificial
  CDR sequence
TIYSRSGGAVYADSVKG

SEQ ID NO: 932 - protein, 16 aa, Artificial
  CDR sequence
TTYSRGGTTYNDSAKG

SEQ ID NO: 933 - protein, 16 aa, Artificial
  CDR sequence
SIGTRGAPVYADSVNG

SEQ ID NO: 934 - protein, 16 aa, Artificial
  CDR sequence
TSDSGGTTLYADSVKG

SEQ ID NO: 935 - protein, 16 aa, Artificial
  CDR sequence
TSDSGGTTLYADSVKG

SEQ ID NO: 936 - protein, 17 aa, Artificial
  CDR sequence
TIYSPSGSAVYADSVKG

SEQ ID NO: 937 - protein, 17 aa, Artificial
  CDR sequence
TIYSPSGSAVYADSVKG

SEQ ID NO: 938 - protein, 17 aa, Artificial
  CDR sequence
TIYSPSGSAVYADSVKG

SEQ ID NO: 939 - protein, 17 aa, Artificial
  CDR sequence
SLYLNGDYPYYADSVKG

SEQ ID NO: 940 - protein, 17 aa, Artificial
  CDR sequence
SMYLDGDYPYYADSVKG

SEQ ID NO: 941 - protein, 16 aa, Artificial
  CDR sequence
SITKFGSTNYADSVKG

SEQ ID NO: 942 - protein, 16 aa, Artificial
  CDR sequence
TSSNTGGTTYDDSVKG

SEQ ID NO: 943 - protein, 17 aa, Artificial
  CDR sequence
CIASSDGSTYYAESVKG

SEQ ID NO: 944 - protein, 16 aa, Artificial
  CDR sequence
SVSGGGNSDYASSVKG

SEQ ID NO: 945 - protein, 16 aa, Artificial
  CDR sequence
SMRGSGSTNYADSARG

SEQ ID NO: 946 - protein, 16 aa, Artificial
  CDR sequence
SMRGSGSTNYADSVRG

SEQ ID NO: 947 - protein, 16 aa, Artificial
  CDR sequence
SMRGSGSTNYADSARG

SEQ ID NO: 948 - protein, 16 aa, Artificial
  CDR sequence
SMRGSGSTNYADSVRG

SEQ ID NO: 949 - protein, 16 aa, Artificial
  CDR sequence
TIHSSGSTIYADSVRG

SEQ ID NO: 950 - protein, 16 aa, Artificial
  CDR sequence
TIGSNGFATYPDSVKG

SEQ ID NO: 951 - protein, 16 aa, Artificial
  CDR sequence
TISRQGMSTYPDSVKG

SEQ ID NO: 952 - protein, 16 aa, Artificial
  CDR sequence
TIGSDGLANYADSVKG

SEQ ID NO: 953 - protein, 16 aa, Artificial
  CDR sequence
TIGSSGHPVYTDSVKG

SEQ ID NO: 954 - protein, 16 aa, Artificial
  CDR sequence
TIGSGGTTNYADSVKG

SEQ ID NO: 955 - protein, 16 aa, Artificial
  CDR sequence
TIGSAGLASYADSVRG

SEQ ID NO: 956 - protein, 16 aa, Artificial
  CDR sequence
TISSAGGTAYADAVKG

SEQ ID NO: 957 - protein, 16 aa, Artificial
  CDR sequence
TIAGDGSTVYADSMKG

SEQ ID NO: 958 - protein, 16 aa, Artificial
  CDR sequence
GVGGDGVGSYADSVKG

SEQ ID NO: 959 - protein, 16 aa, Artificial
  CDR sequence
SIDASGGTNYADSVKG

SEQ ID NO: 960 - protein, 16 aa, Artificial
  CDR sequence
SIDSSGGTNYADSVKG

SEQ ID NO: 961 - protein, 16 aa, Artificial
  CDR sequence
SINSDGSTGYTDSVKG

SEQ ID NO: 962 - protein, 16 aa, Artificial
  CDR sequence
EISSADEPSFADAVKG

SEQ ID NO: 963 - protein, 16 aa, Artificial
  CDR sequence
TILSEGDTNYVDPVKG

SEQ ID NO: 964 - protein, 16 aa, Artificial
  CDR sequence
IISNGGTTSYRDSVKG

SEQ ID NO: 965 - protein, 16 aa, Artificial
  CDR sequence
YITINGIANYVDSVKG

SEQ ID NO: 966 - protein, 16 aa, Artificial
  CDR sequence
HIFRSGITSYASSVKG

SEQ ID NO: 967 - protein, 17 aa, Artificial
  CDR sequence
GISWNGGSTNYADSVKG

SEQ ID NO: 968 - protein, 17 aa, Artificial
  CDR sequence
AIKPDGSITYYADSVKG

SEQ ID NO: 969 - protein, 16 aa, Artificial
  CDR sequence
AVDNDDNTEYSDSVAG

SEQ ID NO: 970 - protein, 16 aa, Artificial
  CDR sequence
AIDDGGNTEYSDFVNG

SEQ ID NO: 971 - protein, 16 aa, Artificial
  CDR sequence
TIAHDGSTNYANSVKG

SEQ ID NO: 972 - protein, 18 aa, Artificial
  CDR sequence
AISSGGGSITTYADSVKG

SEQ ID NO: 973 - protein, 18 aa, Artificial
  CDR sequence
AISSGGGSITTYADSVKG

SEQ ID NO: 974 - protein, 17 aa, Artificial
  CDR sequence
CISSSDGSTYYADSVKG

SEQ ID NO: 975 - protein, 17 aa, Artificial
  CDR sequence
SINWSGTHTDYAEDMKG

SEQ ID NO: 976 - protein, 16 aa, Artificial
  CDR sequence
TIGSNGFATYPDSVKG

SEQ ID NO: 977 - protein, 16 aa, Artificial
  CDR sequence
TIGSNGFATYPDSVKG

SEQ ID NO: 978 - protein, 16 aa, Artificial
  CDR sequence
TIGSNGFATYPDSVKG

SEQ ID NO: 979 - protein, 16 aa, Artificial
  CDR sequence
TIGSNGFATYPDSVKG

SEQ ID NO: 980 - protein, 17 aa, Artificial
  CDR sequence
AIGSGDIITYYADSVKG

SEQ ID NO: 981 - protein, 17 aa, Artificial
  CDR sequence
AINSGGGSTYYADSVKG

SEQ ID NO: 982 - protein, 17 aa, Artificial
  CDR sequence
AISRSPGVTYYADSVKG

SEQ ID NO: 983 - protein, 17 aa, Artificial
  CDR sequence
GIRWSDGSTYYADSVKG

SEQ ID NO: 984 - protein, 17 aa, Artificial
  CDR sequence
GIRWSDGSTYYADSVKG

SEQ ID NO: 985 - protein, 17 aa, Artificial
  CDR sequence
GIRWSDGSTYYADSVKG

SEQ ID NO: 986 - protein, 17 aa, Artificial
  CDR sequence
AIRWSGGNTYYADSVKG

SEQ ID NO: 987 - protein, 18 aa, Artificial
  CDR sequence
AINWRSGGSTYYADSVKG

SEQ ID NO: 988 - protein, 17 aa, Artificial
  CDR sequence
AVRWSDDYTYYADSVKG

SEQ ID NO: 989 - protein, 17 aa, Artificial
  CDR sequence
GINKSGGITHSADSVKG

SEQ ID NO: 990 - protein, 17 aa, Artificial
  CDR sequence
NIKWSGDRIVYADSVKG

SEQ ID NO: 991 - protein, 16 aa, Artificial
  CDR sequence
VIISSGTTTYADSVKG

SEQ ID NO: 992 - protein, 17 aa, Artificial
  CDR sequence
AITDNGGSTYYADSVKG

SEQ ID NO: 993 - protein, 16 aa, Artificial
  CDR sequence
AITSSGSTNYADSVKG

SEQ ID NO: 994 - protein, 16 aa, Artificial
  CDR sequence
AITSSGSTNYADSVKG

SEQ ID NO: 995 - protein, 16 aa, Artificial
  CDR sequence
TINSGGDTNYAGSVKG

SEQ ID NO: 996 - protein, 17 aa, Artificial
  CDR sequence
AISSSGISTIYGDSVKG

SEQ ID NO: 997 - protein, 17 aa, Artificial
  CDR sequence
HITWNGGSTYYADSVKG

SEQ ID NO: 998 - protein, 18 aa, Artificial
  CDR sequence
AISGWSGGTTNYADSVKG

SEQ ID NO: 999 - protein, 17 aa, Artificial
  CDR sequence
AISWNGVTIYYADSVKG

SEQ ID NO: 1000 - protein, 15 aa, Artificial
  CDR sequence
VISGVGTSYADSVKG

SEQ ID NO: 1001 - protein, 16 aa, Artificial
  CDR sequence
SISSGSAINYADSVKG

SEQ ID NO: 1002 - protein, 16 aa, Artificial
  CDR sequence
TLTSAGNTNYADSVKG

SEQ ID NO: 1003 - protein, 17 aa, Artificial
  CDR sequence
GIAWNGASIGSADSVRG

SEQ ID NO: 1004 - protein, 17 aa, Artificial
  CDR sequence
GITMSGFNTRYADSVKG

SEQ ID NO: 1005 - protein, 17 aa, Artificial
  CDR sequence
GISWSGGHTFYADSVKG

SEQ ID NO: 1006 - protein, 17 aa, Artificial
  CDR sequence
TIDWSGDTAFYADSVKG

SEQ ID NO: 1007 - protein, 17 aa, Artificial
  CDR sequence
AVSWDGRNTYYADSVKG

SEQ ID NO: 1008 - protein, 16 aa, Artificial
  CDR sequence
RVSWIRTTYYSDSVKG

SEQ ID NO: 1009 - protein, 17 aa, Artificial
  CDR sequence
AIGWSGASTYYIDSVEG

SEQ ID NO: 1010 - protein, 17 aa, Artificial
  CDR sequence
AIRWSGGTTFYGDSVKG

SEQ ID NO: 1011 - protein, 17 aa, Artificial
  CDR sequence
AITWNGTRTYYRDSVKG

SEQ ID NO: 1012 - protein, 17 aa, Artificial
  CDR sequence
AIRWSGGSAFYADSVKG

SEQ ID NO: 1013 - protein, 16 aa, Artificial
  CDR sequence
AITSSGSTNYADSVKG

SEQ ID NO: 1014 - protein, 16 aa, Artificial
  CDR sequence
AIRSSGGLFYALSVSG

SEQ ID NO: 1015 - protein, 16 aa, Artificial
  CDR sequence
AIRSGGTTLYEDSVKG

SEQ ID NO: 1016 - protein, 16 aa, Artificial
  CDR sequence
VIRSGGTTLYADSVKG

SEQ ID NO: 1017 - protein, 16 aa, Artificial
  CDR sequence
AIRSGGTTLYEDSVKG

SEQ ID NO: 1018 - protein, 16 aa, Artificial
  CDR sequence
AIRSGATTLYEDSVKG

SEQ ID NO: 1019 - protein, 16 aa, Artificial
  CDR sequence
VIRSGGTTLYEDSVKG

SEQ ID NO: 1020 - protein, 16 aa, Artificial
  CDR sequence
VTRSGGTTFYADSAKG

SEQ ID NO: 1021 - protein, 17 aa, Artificial
  CDR sequence
AINSGGGSTSYADSVKG

SEQ ID NO: 1022 - protein, 17 aa, Artificial
  CDR sequence
LITRNGETKKTADSVKG

SEQ ID NO: 1023 - protein, 17 aa, Artificial
  CDR sequence
AIRWSGGITYYADSVKG

SEQ ID NO: 1024 - protein, 17 aa, Artificial
  CDR sequence
AISRSGTGTYYAGSMKG

SEQ ID NO: 1025 - protein, 17 aa, Artificial
  CDR sequence
RVWWNGGSAYYADSVKG

SEQ ID NO: 1026 - protein, 17 aa, Artificial
  CDR sequence
AISPIGSSKYYADSVKG

SEQ ID NO: 1027 - protein, 17 aa, Artificial
  CDR sequence
AISTSGGGTDSADSVKG

SEQ ID NO: 1028 - protein, 17 aa, Artificial
  CDR sequence
AITWSGDSTNFADSVKG

SEQ ID NO: 1029 - protein, 16 aa, Artificial
  CDR sequence
TIFVGGTTYYSDSVKG

SEQ ID NO: 1030 - protein, 16 aa, Artificial
  CDR sequence
TIFVGGTTYYSDSVKG

SEQ ID NO: 1031 - protein, 17 aa, Artificial
  CDR sequence
AKTWSGASTYYADSVRG

SEQ ID NO: 1032 - protein, 16 aa, Artificial
  CDR sequence
TIFVGGTTYYSDSVKG

SEQ ID NO: 1033 - protein, 17 aa, Artificial
  CDR sequence
AITWNGASTSYADSVKG

SEQ ID NO: 1034 - protein, 16 aa, Artificial
  CDR sequence
RITSTGSTNYADSVKG

SEQ ID NO: 1035 - protein, 17 aa, Artificial
  CDR sequence
AIKSSDNSTSYRDSVKG

SEQ ID NO: 1036 - protein, 16 aa, Artificial
  CDR sequence
AVTSGGITNYADSVKG

SEQ ID NO: 1037 - protein, 17 aa, Artificial
  CDR sequence
ASRWSGGIKYHADSVKG

SEQ ID NO: 1038 - protein, 17 aa, Artificial
  CDR sequence
AIRWSGSATDYSDSVKG

SEQ ID NO: 1039 - protein, 16 aa, Artificial
  CDR sequence
TITADGITNYADSVKG

SEQ ID NO: 1040 - protein, 16 aa, Artificial
  CDR sequence
AVTEGGTTSYAASVKG

SEQ ID NO: 1041 - protein, 16 aa, Artificial
  CDR sequence
AVTEDGSINYAESVKG

SEQ ID NO: 1042 - protein, 16 aa, Artificial
  CDR sequence
EITEGGIINYTDSVKG

SEQ ID NO: 1043 - protein, 16 aa, Artificial
  CDR sequence
LINVGGVAKYEDSVKG

SEQ ID NO: 1044 - protein, 17 aa, Artificial
  CDR sequence
AVSWSGGNTYYADSVKG

SEQ ID NO: 1045 - protein, 17 aa, Artificial
  CDR sequence
GISWSGGSTDYADSVKG

SEQ ID NO: 1046 - protein, 20 aa, Artificial
  CDR sequence
FVAATSWSGGSKYVADSVTG

SEQ ID NO: 1047 - protein, 17 aa, Artificial
  CDR sequence
ATGRRGGPTYYADSVKG

SEQ ID NO: 1048 - protein, 16 aa, Artificial
  CDR sequence
TITGSTGTTYADSVKG

SEQ ID NO: 1049 - protein, 17 aa, Artificial
  CDR sequence
AINWSGSHTDYGDSVKG

SEQ ID NO: 1050 - protein, 17 aa, Artificial
  CDR sequence
GITRNSGRTRYADSVKG

SEQ ID NO: 1051 - protein, 17 aa, Artificial
  CDR sequence
GITRNSIRTRYADSVKG

SEQ ID NO: 1052 - protein, 17 aa, Artificial
  CDR sequence
AINRNGATAAYADSVKG

SEQ ID NO: 1053 - protein, 19 aa, Artificial
  CDR sequence
TIRWTGGSSSTSYADSVKG

SEQ ID NO: 1054 - protein, 17 aa, Artificial
  CDR sequence
AMNWSGGSTKYAESVKG

SEQ ID NO: 1055 - protein, 17 aa, Artificial
  CDR sequence
AISWSQYNTKYADSVKG

SEQ ID NO: 1056 - protein, 16 aa, Artificial
  CDR sequence
SITYGGNINYGDPVKG

SEQ ID NO: 1057 - protein, 17 aa, Artificial
  CDR sequence
GVNWGGGSTKVADSVKE

SEQ ID NO: 1058 - protein, 16 aa, Artificial
  CDR sequence
FTRWPSITYIAEHVKG

SEQ ID NO: 1059 - protein, 16 aa, Artificial
  CDR sequence
AITSDHITWYADAVKG

SEQ ID NO: 1060 - protein, 16 aa, Artificial
  CDR sequence
TINVGGGTYYAGPVKG

SEQ ID NO: 1061 - protein, 17 aa, Artificial
  CDR sequence
TINRRGGNTYYADSVKG

SEQ ID NO: 1062 - protein, 18 aa, Artificial
  CDR sequence
TISWSGGRDTVYADSVKG

SEQ ID NO: 1063 - protein, 17 aa, Artificial
  CDR sequence
CIESGDGTTTYVDSVKG

SEQ ID NO: 1064 - protein, 17 aa, Artificial
  CDR sequence
AINWSGGTTSFGDSVKG

SEQ ID NO: 1065 - protein, 17 aa, Artificial
  CDR sequence
AIRWSGGITWYAESVKS

SEQ ID NO: 1066 - protein, 17 aa, Artificial
  CDR sequence
AVRWSGGITWYAESVKG

SEQ ID NO: 1067 - protein, 17 aa, Artificial
  CDR sequence
TISRSGGRTSYADSVKG

SEQ ID NO: 1068 - protein, 17 aa, Artificial
  CDR sequence
TISRSGGRTSYADSVKG

SEQ ID NO: 1069 - protein, 15 aa, Artificial
  CDR sequence
RIAGGSTNYADSVKG

SEQ ID NO: 1070 - protein, 17 aa, Artificial
  CDR sequence
AIDWDGSRTQYADSVKG

SEQ ID NO: 1071 - protein, 17 aa, Artificial
  CDR sequence
TITWSGDSTYVTDSVKG

SEQ ID NO: 1072 - protein, 17 aa, Artificial
  CDR sequence
AINLSSGSTYYPDSVKG

SEQ ID NO: 1073 - protein, 17 aa, Artificial
  CDR sequence
AISRSGESTYFADSMKG

SEQ ID NO: 1074 - protein, 17 aa, Artificial
  CDR sequence
GISWDGGSTFYANSVKG

SEQ ID NO: 1075 - protein, 16 aa, Artificial
  CDR sequence
RIISDDSTLYADSVKG

SEQ ID NO: 1076 - protein, 17 aa, Artificial
  CDR sequence
TINWSGSHTDYADSVKG

SEQ ID NO: 1077 - protein, 17 aa, Artificial
  CDR sequence
AINWSGTHTDYADSVKG

SEQ ID NO: 1078 - protein, 16 aa, Artificial
  CDR sequence
AVGWYGSTYFADSVKG

SEQ ID NO: 1079 - protein, 16 aa, Artificial
  CDR sequence
LISAGDSTYYPDSVKG

SEQ ID NO: 1080 - protein, 17 aa, Artificial
  CDR sequence
AISWTGGSSYYGDSVKG

SEQ ID NO: 1081 - protein, 17 aa, Artificial
  CDR sequence
AINWSGSHRDYADSAKG

SEQ ID NO: 1082 - protein, 17 aa, Artificial
  CDR sequence
AINWSGGYTDYADSVKG

SEQ ID NO: 1083 - protein, 17 aa, Artificial
  CDR sequence
ATTRSGGLPYYSDSVKG

SEQ ID NO: 1084 - protein, 16 aa, Artificial
  CDR sequence
YIGTAGATHYADSVKG

SEQ ID NO: 1085 - protein, 16 aa, Artificial
  CDR sequence
TIIGDGRTHYADSVKD

SEQ ID NO: 1086 - protein, 17 aa, Artificial
  CDR sequence
SINWSGTHTYDADFVKG

SEQ ID NO: 1087 - protein, 17 aa, Artificial
  CDR sequence
TINWSGSHSDYADSVKG

SEQ ID NO: 1088 - protein, 16 aa, Artificial
  CDR sequence
GINWSGRTYYVDSVKG

SEQ ID NO: 1089 - protein, 26 aa, Artificial
  CDR sequence
AIRGSGGSTYIADPARSTYYADFVKG

SEQ ID NO: 1090 - protein, 17 aa, Artificial
  CDR sequence
ALSKDGARTYYAASVKG

SEQ ID NO: 1091 - protein, 17 aa, Artificial
  CDR sequence
TIRWSGSATFYSDSVKG

SEQ ID NO: 1092 - protein, 17 aa, Artificial
  CDR sequence
AISSSGVTTIYADSVRG

SEQ ID NO: 1093 - protein, 15 aa, Artificial
  CDR sequence
IVTDGFTNYADFAKG

SEQ ID NO: 1094 - protein, 15 aa, Artificial
  CDR sequence
IVTDGFTNYADFAKG

SEQ ID NO: 1095 - protein, 16 aa, Artificial
  CDR sequence
DISFGGNTNYANSVKG

SEQ ID NO: 1096 - protein, 17 aa, Artificial
  CDR sequence
CIANSEGTKYYADSAQG

SEQ ID NO: 1097 - protein, 17 aa, Artificial
  CDR sequence
SINSDGDTTYYADSVKG

SEQ ID NO: 1098 - protein, 17 aa, Artificial
  CDR sequence
AISRDGAATYYTDSVKG

SEQ ID NO: 1099 - protein, 18 aa, Artificial
  CDR sequence
CITPHHGGIIFTRESVKG

SEQ ID NO: 1100 - protein, 16 aa, Artificial
  CDR sequence
AVTSGGGTNYATSVKG

SEQ ID NO: 1101 - protein, 32 aa, Artificial
  Framework sequence
RFTISRDNAKNTLFLQMNSLNPEDTAVYYCGQ

SEQ ID NO: 1102 - protein, 32 aa, Artificial
  Framework sequence
RFTISRDNAKNTLFLQMNSLSPEDTAVYYCNQ

SEQ ID NO: 1103 - protein, 32 aa, Artificial
  Framework sequence
RFTISRDNAKNTLFLQMNNLTPEDTAVYYCNR

SEQ ID NO: 1104 - protein, 32 aa, Artificial
  Framework sequence
RFTISRDNAKNTLFLQMNNLRSEDTAVYSCNQ

SEQ ID NO: 1105 - protein, 32 aa, Artificial
  Framework sequence
RFTISRDNAKNTLFLQMNSLRSEDTAVYYCNQ

SEQ ID NO: 1106 - protein, 32 aa, Artificial; identical to SEQ ID NO: 1105
  Framework sequence

SEQ ID NO: 1107 - protein, 32 aa, Artificial; identical to SEQ ID NO: 1105
  Framework sequence

SEQ ID NO: 1108 - protein, 32 aa, Artificial
  Framework sequence
RFTISRDNAKNTVYLEMNSLTPEDTAVYYCNQ

SEQ ID NO: 1109 - protein, 32 aa, Artificial; identical to SEQ ID NO: 1105
  Framework sequence

SEQ ID NO: 1110 - protein, 32 aa, Artificial; identical to SEQ ID NO: 1105
  Framework sequence

SEQ ID NO: 1111 - protein, 32 aa, Artificial
  Framework sequence
RFTISRDNAKNTLFLQMNSLTPEDTAVYYCNQ

SEQ ID NO: 1112 - protein, 32 aa, Artificial; identical to SEQ ID NO: 1111
  Framework sequence

SEQ ID NO: 1113 - protein, 32 aa, Artificial
  Framework sequence
RFTISRDNARNTLFLQMNSLTPEDTAIYYCNQ

SEQ ID NO: 1114 - protein, 32 aa, Artificial; identical to SEQ ID NO: 1102
  Framework sequence

SEQ ID NO: 1115 - protein, 32 aa, Artificial; identical to SEQ ID NO: 1102
  Framework sequence

SEQ ID NO: 1116 - protein, 32 aa, Artificial
  Framework sequence
RFTISRDNAKNTLFLQMNSLSPEDTAVYYCNR

SEQ ID NO: 1117 - protein, 32 aa, Artificial; identical to SEQ ID NO: 1111
  Framework sequence

SEQ ID NO: 1118 - protein, 32 aa, Artificial
  Framework sequence
RFVISRDNAKNTLFLQMNSLSPEDTAVYYCNQ

SEQ ID NO: 1119 - protein, 32 aa, Artificial; identical to SEQ ID NO: 1111
  Framework sequence

SEQ ID NO: 1120 - protein, 32 aa, Artificial; identical to SEQ ID NO: 1111
  Framework sequence

SEQ ID NO: 1121 - protein, 32 aa, Artificial; identical to SEQ ID NO: 1111
  Framework sequence

SEQ ID NO: 1122 - protein, 32 aa, Artificial
  Framework sequence
RFTISRDNAKNTLFLQMNNLTPEDTAVYYCNQ

SEQ ID NO: 1123 - protein, 32 aa, Artificial; identical to SEQ ID NO: 1118
  Framework sequence

SEQ ID NO: 1124 - protein, 32 aa, Artificial
  Framework sequence
RFTISRDNAKNTLFLQMNSLSPEDTAVYYCNK

SEQ ID NO: 1125 - protein, 32 aa, Artificial
  Framework sequence
RFTISRDNAKNTLFLQMNSLNPEDTAVYYCNQ

SEQ ID NO: 1126 - protein, 32 aa, Artificial; identical to SEQ ID NO: 1111
  Framework sequence

SEQ ID NO: 1127 - protein, 32 aa, Artificial; identical to SEQ ID NO: 1111
  Framework sequence

SEQ ID NO: 1128 - protein, 32 aa, Artificial
  Framework sequence
RFTISRDNAKNTLFLQMNSLTPENTAVYYCNQ

SEQ ID NO: 1129 - protein, 32 aa, Artificial
  Framework sequence
RFTISRDNAKNTLFLHMNNLSPEDTAVYYCGQ

SEQ ID NO: 1130 - protein, 32 aa, Artificial; identical to SEQ ID NO: 1111
  Framework sequence

SEQ ID NO: 1131 - protein, 32 aa, Artificial; identical to SEQ ID NO: 1102
  Framework sequence

SEQ ID NO: 1132 - protein, 32 aa, Artificial
  Framework sequence
RFTISRDNAKKTVYLQMNSLQSEDTAVYYCGT

SEQ ID NO: 1133 - protein, 32 aa, Artificial
  Framework sequence
RFTISRDNNKKTVYLQMNSLKSEDTAVYYCAT

SEQ ID NO: 1134 - protein, 32 aa, Artificial; identical to SEQ ID NO: 1132
  Framework sequence

SEQ ID NO: 1135 - protein, 32 aa, Artificial
  Framework sequence
RFTISRDNAKKTLYLQMNSLKSEDTAVYYCAT

SEQ ID NO: 1136 - protein, 32 aa, Artificial
  Framework sequence
RFTISRNNANNTLYLQMNNLKFEDTAVYYCAK

SEQ ID NO: 1137 - protein, 32 aa, Artificial; identical to SEQ ID NO: 1136
  Framework sequence

SEQ ID NO: 1138 - protein, 32 aa, Artificial
  Framework sequence
RFTISRNNANNTLYLQMNSLKSEDTAVYYCAK

SEQ ID NO: 1139 - protein, 32 aa, Artificial; identical to SEQ ID NO: 1136
  Framework sequence

SEQ ID NO: 1140 - protein, 32 aa, Artificial; identical to SEQ ID NO: 1138
  Framework sequence

SEQ ID NO: 1141 - protein, 32 aa, Artificial
  Framework sequence
RFTISRNNANNMLYLQMNSLKSEDTAVYYCAK

SEQ ID NO: 1142 - protein, 32 aa, Artificial; identical to SEQ ID NO: 1136
  Framework sequence

SEQ ID NO: 1143 - protein, 32 aa, Artificial
  Framework sequence
RFTISRNNANNTLYLQMNSLKSDDTAVYYCAK

SEQ ID NO: 1144 - protein, 32 aa, Artificial; identical to SEQ ID NO: 1138
  Framework sequence

SEQ ID NO: 1145 - protein, 32 aa, Artificial; identical to SEQ ID NO: 1138
  Framework sequence

SEQ ID NO: 1146 - protein, 32 aa, Artificial; identical to SEQ ID NO: 1138
  Framework sequence

SEQ ID NO: 1147 - protein, 32 aa, Artificial; identical to SEQ ID NO: 1143
  Framework sequence

SEQ ID NO: 1148 - protein, 32 aa, Artificial; identical to SEQ ID NO: 1138
  Framework sequence

SEQ ID NO: 1149 - protein, 32 aa, Artificial; identical to SEQ ID NO: 1138
  Framework sequence

SEQ ID NO: 1150 - protein, 32 aa, Artificial; identical to SEQ ID NO: 1138
  Framework sequence

SEQ ID NO: 1151 - protein, 32 aa, Artificial; identical to SEQ ID NO: 1138
  Framework sequence

SEQ ID NO: 1152 - protein, 32 aa, Artificial; identical to SEQ ID NO: 1143
  Framework sequence

SEQ ID NO: 1153 - protein, 32 aa, Artificial; identical to SEQ ID NO: 1138
  Framework sequence

SEQ ID NO: 1154 - protein, 32 aa, Artificial; identical to SEQ ID NO: 1138
  Framework sequence

SEQ ID NO: 1155 - protein, 32 aa, Artificial; identical to SEQ ID NO: 1138
  Framework sequence

SEQ ID NO: 1156 - protein, 32 aa, Artificial; identical to SEQ ID NO: 1138
  Framework sequence

SEQ ID NO: 1157 - protein, 32 aa, Artificial; identical to SEQ ID NO: 1143
  Framework sequence

SEQ ID NO: 1158 - protein, 32 aa, Artificial; identical to SEQ ID NO: 1138
  Framework sequence

SEQ ID NO: 1159 - protein, 32 aa, Artificial; identical to SEQ ID NO: 1138
  Framework sequence

SEQ ID NO: 1160 - protein, 32 aa, Artificial; identical to SEQ ID NO: 1143
  Framework sequence

SEQ ID NO: 1161 - protein, 32 aa, Artificial; identical to SEQ ID NO: 1138
  Framework sequence

SEQ ID NO: 1162 - protein, 32 aa, Artificial
  Framework sequence
RFTISRDNAKNTVYLQMNSLKPEDTAVYYCKR

SEQ ID NO: 1163 - protein, 32 aa, Artificial
  Framework sequence
RFTISRDNAKNTLHLQMNSLKPEDTAVYYCAY

SEQ ID NO: 1164 - protein, 32 aa, Artificial
  Framework sequence
RFTISRVNAKDTVYLQMNSLKPEDTAVYYCYM

SEQ ID NO: 1165 - protein, 32 aa, Artificial
  Framework sequence
RFTISRDNAKKTVYLQMNSLKPEDTARYYCGV

SEQ ID NO: 1166 - protein, 32 aa, Artificial
  Framework sequence
RFTISRDNAKETVYLQMNSLKPDDTGVYYCAA

SEQ ID NO: 1167 - protein, 32 aa, Artificial
  Framework sequence
RFTISRDNAKETVYLQMNSLKPEDTGVYYCAA

SEQ ID NO: 1168 - protein, 32 aa, Artificial; identical to SEQ ID NO: 1166
  Framework sequence

SEQ ID NO: 1169 - protein, 32 aa, Artificial; identical to SEQ ID NO: 1166
  Framework sequence

SEQ ID NO: 1170 - protein, 32 aa, Artificial
  Framework sequence
RFTISRDNAKKTVYLQMNSLKPEDTAVYYCAT

SEQ ID NO: 1171 - protein, 32 aa, Artificial
  Framework sequence
RFTISRDNAKKTAYLQMNSLKPEDTAVYYCAA

SEQ ID NO: 1172 - protein, 32 aa, Artificial; identical to SEQ ID NO: 1171
  Framework sequence

SEQ ID NO: 1173 - protein, 32 aa, Artificial; identical to SEQ ID NO: 1170
  Framework sequence

SEQ ID NO: 1174 - protein, 32 aa, Artificial
  Framework sequence
RFTISRDNAKKTVYLQMNSLKPEDTAVYYCAA

SEQ ID NO: 1175 - protein, 32 aa, Artificial; identical to SEQ ID NO: 1174
  Framework sequence

SEQ ID NO: 1176 - protein, 32 aa, Artificial; identical to SEQ ID NO: 1174
  Framework sequence

SEQ ID NO: 1177 - protein, 32 aa, Artificial
  Framework sequence
RFTMARDNANHTVHLQMNSLKPEDTAVYYCNA

SEQ ID NO: 1178 - protein, 32 aa, Artificial
  Framework sequence
RFTVSRDIAENTVYLQMNTLKSEDTAVYYCAA

SEQ ID NO: 1179 - protein, 32 aa, Artificial
  Framework sequence
RFTISSDNAKNTVYLQMNSLKPEDTAVYYCAA

SEQ ID NO: 1180 - protein, 32 aa, Artificial
  Framework sequence
RFTISRDNAKNTLYLQMSSLKPEDTALYYCTK

SEQ ID NO: 1181 - protein, 32 aa, Artificial
  Framework sequence
RFTISRDNAKNTLYLQMNSLKPEDTAVYYCAA

SEQ ID NO: 1182 - protein, 32 aa, Artificial
  Framework sequence
RFTVSRDNANNTVYLQMNTLKPEDTAVYYCRD

SEQ ID NO: 1183 - protein, 32 aa, Artificial
  Framework sequence
RFTVSRDNAKNTVYLQMNSLKAEDTAVYYCWD

SEQ ID NO: 1184 - protein, 32 aa, Artificial; identical to SEQ ID NO: 1182
  Framework sequence

SEQ ID NO: 1185 - protein, 32 aa, Artificial
  Framework sequence
RFTVSRDNDKNTLYLQMNSLKPEDTAVYYCRD

SEQ ID NO: 1186 - protein, 32 aa, Artificial; identical to SEQ ID NO: 1182
  Framework sequence

SEQ ID NO: 1187 - protein, 32 aa, Artificial
  Framework sequence
RFTVSRDNAKNTLYLQMNSLKPEDTATYLCRD

SEQ ID NO: 1188 - protein, 32 aa, Artificial
  Framework sequence
RFTVSRDNAKNTLYLQMNSLEPEDTATYYCWD

SEQ ID NO: 1189 - protein, 32 aa, Artificial
  Framework sequence
RFTVSRDNAKNTLYLRMNSLKSEDSATYTCRA

SEQ ID NO: 1190 - protein, 32 aa, Artificial
  Framework sequence
RFTVSRDNAKNTVYLQMNSLKPEDTAVYYCRD

SEQ ID NO: 1191 - protein, 32 aa, Artificial
  Framework sequence
RFTVSRDNANHTVYLQMNSLKPEDTAVYYCRD

SEQ ID NO: 1192 - protein, 32 aa, Artificial; identical to SEQ ID NO: 1190
  Framework sequence

SEQ ID NO: 1193 - protein, 32 aa, Artificial; identical to SEQ ID NO: 1190
  Framework sequence

SEQ ID NO: 1194 - protein, 32 aa, Artificial
  Framework sequence
RFTVSRDNAKNTLYLQMNSLKPEDTAVYYCWD

SEQ ID NO: 1195 - protein, 32 aa, Artificial
  Framework sequence
RFAISRDNAKNTAYLQMNSLKAEDTAVYYCNA

SEQ ID NO: 1196 - protein, 32 aa, Artificial; identical to SEQ ID NO: 1177
  Framework sequence

SEQ ID NO: 1197 - protein, 32 aa, Artificial; identical to SEQ ID NO: 1177
  Framework sequence

SEQ ID NO: 1198 - protein, 32 aa, Artificial
  Framework sequence
RFTISRDNAENTVYLQMNSLKPEDTAVYYCWD

SEQ ID NO: 1199 - protein, 32 aa, Artificial
  Framework sequence
RFTISRDNAKNTVYLQINSLKPEDTAVYYCWD

SEQ ID NO: 1200 - protein, 32 aa, Artificial
  Framework sequence
RFTISRDNAKKTMYLQMNSLKPDDTAVYYCRD

SEQ ID NO: 1201 - protein, 32 aa, Artificial
  Framework sequence
RFTVSRDNAENTVYLQMNSLKPEDTAVYYCRD

SEQ ID NO: 1202 - protein, 32 aa, Artificial
  Framework sequence
RFTLSRDNAKNTVYLQMNSLKPEDTAVYYCRD

SEQ ID NO: 1203 - protein, 32 aa, Artificial; identical to SEQ ID NO: 1198
  Framework sequence

SEQ ID NO: 1204 - protein, 32 aa, Artificial
  Framework sequence
RFTLSRHNAENTVYLQMNSLKPEDTAVYYCRD

SEQ ID NO: 1205 - protein, 32 aa, Artificial
  Framework sequence
RFTISSDNAKSTIYLQMNSLKPDDTAVYYCRD

SEQ ID NO: 1206 - protein, 32 aa, Artificial
  Framework sequence
RFTISSDNAKNTIYLQMNSLKPDDTAVYYCRD

SEQ ID NO: 1207 - protein, 32 aa, Artificial
  Framework sequence
RFTISRDNAKKTVYLQMNSLKPEDTAVYYCRD

SEQ ID NO: 1208 - protein, 32 aa, Artificial
  Framework sequence
RFTISRDGATNTVFLQMNNLKPEDTAVYYCRD

SEQ ID NO: 1209 - protein, 32 aa, Artificial; identical to SEQ ID NO: 1201
  Framework sequence

SEQ ID NO: 1210 - protein, 32 aa, Artificial
  Framework sequence
RFTVSRDNADNTVYLQMNSLKPEDTAVYYCRD

SEQ ID NO: 1211 - protein, 32 aa, Artificial
  Framework sequence
RFTISSDNAKSTIYLQMNSLEPDDTAVYYCRD

SEQ ID NO: 1212 - protein, 32 aa, Artificial
  Framework sequence
RFTISSDNAKKTIYLQMNSLKPDDTAVYYCRD

SEQ ID NO: 1213 - protein, 32 aa, Artificial; identical to SEQ ID NO: 1205
  Framework sequence

SEQ ID NO: 1214 - protein, 32 aa, Artificial
  Framework sequence
RFTISRDNAKNAVILQMNNLKTEDTAVYYCAA

SEQ ID NO: 1215 - protein, 32 aa, Artificial; identical to SEQ ID NO: 1214
  Framework sequence

SEQ ID NO: 1216 - protein, 32 aa, Artificial
  Framework sequence
RFTISNDNAKDTVYLQMNSLKSEDTAVYYCRN

SEQ ID NO: 1217 - protein, 32 aa, Artificial
  Framework sequence
RFTISRDNAKNTVYLQMNSLKPEDTGVYYCRD

SEQ ID NO: 1218 - protein, 32 aa, Artificial
  Framework sequence
RFTISKDYTRNTVYLQVNSLKPEDTAVYHCAT

SEQ ID NO: 1219 - protein, 32 aa, Artificial
  Framework sequence
RFTISGDTAKSTLYLQMNSLKPEDTAMYYCYG

SEQ ID NO: 1220 - protein, 32 aa, Artificial
  Framework sequence
RFAISRDNAKNTVYLQMNSLKPEDTAVYYCRD

SEQ ID NO: 1221 - protein, 32 aa, Artificial
  Framework sequence
RFAISRDNAKNMVYLQMNTLKPEDTAVYYCRD

SEQ ID NO: 1222 - protein, 32 aa, Artificial; identical to SEQ ID NO: 1220
  Framework sequence

SEQ ID NO: 1223 - protein, 32 aa, Artificial
  Framework sequence
RFAISRDNAKNTVYLQMNTLKPEDTAVYYCRD

SEQ ID NO: 1224 - protein, 32 aa, Artificial
  Framework sequence
RFAISRDNAKNTVYLQMRSLKPEDTAVYYCRD

SEQ ID NO: 1225 - protein, 32 aa, Artificial
  Framework sequence
RFTISRDNAKNTVYLQMNSLKPEDTAVYYCRD

SEQ ID NO: 1226 - protein, 32 aa, Artificial
  Framework sequence
RFTISRDNAKNTVYLQMNNLKPEDTAVYYCRD

SEQ ID NO: 1227 - protein, 32 aa, Artificial
  Framework sequence
RFTISRDNAKKTVYLQMNSLKPEDTAVYFCRD

SEQ ID NO: 1228 - protein, 32 aa, Artificial
  Framework sequence
RFTFSKDGAKNTVYLQMNSLKPEDTAVYYCRD

SEQ ID NO: 1229 - protein, 32 aa, Artificial; identical to SEQ ID NO: 1225
  Framework sequence

SEQ ID NO: 1230 - protein, 32 aa, Artificial
  Framework sequence
RFTLSRDNAKKTVYLQMNSLKPEDTAIYYCRD

SEQ ID NO: 1231 - protein, 34 aa, Artificial
  Framework sequence
RFTISISRDNVEYTVDLQMDSLKPEDTAVYYCRD

SEQ ID NO: 1232 - protein, 32 aa, Artificial
  Framework sequence
RFTISRDNAKNTVYLQVNSLKPEDTAVYYCWD

SEQ ID NO: 1233 - protein, 32 aa, Artificial
  Framework sequence
RFTISRDNAKNTLYLQMNSLKPEDTALYYCTK

SEQ ID NO: 1234 - protein, 32 aa, Artificial
  Framework sequence
RFTISRDNAKNTVYLEMNSLKPEDTGVYYCNG

SEQ ID NO: 1235 - protein, 32 aa, Artificial; identical to SEQ ID NO: 1234
  Framework sequence

SEQ ID NO: 1236 - protein, 32 aa, Artificial
  Framework sequence
RFTISRDNTKNTLDLQMNSLKPEDTAVYYCHG

SEQ ID NO: 1237 - protein, 32 aa, Artificial
  Framework sequence
RFTISRDNAKNTVVLQMNGLKPEDTAVYYCKG

SEQ ID NO: 1238 - protein, 32 aa, Artificial
  Framework sequence
RFTISRDNAKNTVYLQMNDLKPEDTAVYYCNG

SEQ ID NO: 1239 - protein, 32 aa, Artificial
  Framework sequence
RFTIARDNAKNTVSLQMNSLKPEDTAVYYCNL

SEQ ID NO: 1240 - protein, 32 aa, Artificial
  Framework sequence
RFTISRDNTKNTMYLQMVSLKPEDTAVYYCNV

SEQ ID NO: 1241 - protein, 32 aa, Artificial
  Framework sequence
RFTISRDNAKNTVYLQMASLKPEDTAAYYCAA

SEQ ID NO: 1242 - protein, 32 aa, Artificial
  Framework sequence
RFTISRDNVKNTLYLQMNSLKSEDTAVYYCAK

SEQ ID NO: 1243 - protein, 32 aa, Artificial
  Framework sequence
RFTISRDNAKNTVYLQMNSLKPEDTAVYYCAT

SEQ ID NO: 1244 - protein, 32 aa, Artificial
  Framework sequence
RFTISRDNAKNAVHLQMNSLRLEDTAVYYCNA

SEQ ID NO: 1245 - protein, 32 aa, Artificial
  Framework sequence
RFTISRDNPETAVHLQMNSLKLEDTAVYYCNA

SEQ ID NO: 1246 - protein, 32 aa, Artificial
  Framework sequence
RFTISRDNARDTLFLQMHALQPEDTAVYMCNL

SEQ ID NO: 1247 - protein, 32 aa, Artificial
  Framework sequence
RFTISRDNAKNTLYLQMSSLKPEDTALYYCAK

SEQ ID NO: 1248 - protein, 32 aa, Artificial
  Framework sequence
RFTISTDNAKNTLYLQMSSLKPEDTALYYCAK

SEQ ID NO: 1249 - protein, 32 aa, Artificial; identical to SEQ ID NO: 1243
  Framework sequence

SEQ ID NO: 1250 - protein, 32 aa, Artificial
  Framework sequence
RFTISRDNAKKTLYLQMNSLQSEDTAVYYCAK

SEQ ID NO: 1251 - protein, 32 aa, Artificial; identical to SEQ ID NO: 1225
  Framework sequence

SEQ ID NO: 1252 - protein, 32 aa, Artificial; identical to SEQ ID NO: 1225
  Framework sequence

SEQ ID NO: 1253 - protein, 32 aa, Artificial; identical to SEQ ID NO: 1225
  Framework sequence

SEQ ID NO: 1254 - protein, 32 aa, Artificial; identical to SEQ ID NO: 1225
  Framework sequence

SEQ ID NO: 1255 - protein, 32 aa, Artificial
  Framework sequence
RFTISRDNAKNTVYLQMNSLKPEDTAVYYCAS

SEQ ID NO: 1256 - protein, 32 aa, Artificial
  Framework sequence
RFTISRDNAKNTLYLQMNSLKPEDTAVYYCAR

SEQ ID NO: 1257 - protein, 32 aa, Artificial
  Framework sequence
RFTTSRDNAKNTVYLQMNDLKPEDTAVYYCAA

SEQ ID NO: 1258 - protein, 32 aa, Artificial
  Framework sequence
RFTISRDNAKNTVYLQMNSLKPEDTAVYYCAA

SEQ ID NO: 1259 - protein, 32 aa, Artificial
  Framework sequence
RFTISRANAKNTVYLQMNGLKPEDTAVYYCAA

SEQ ID NO: 1260 - protein, 32 aa, Artificial
  Framework sequence
RFTISRDNAKITVYLQMNSLKPEDTAVYYCAA

SEQ ID NO: 1261 - protein, 32 aa, Artificial; identical to SEQ ID NO: 1258
  Framework sequence

SEQ ID NO: 1262 - protein, 32 aa, Artificial; identical to SEQ ID NO: 1258
  Framework sequence

SEQ ID NO: 1263 - protein, 32 aa, Artificial
  Framework sequence
RFTISRDNAKNTVYLQMNSLSPEDTAVYYCAA

SEQ ID NO: 1264 - protein, 32 aa, Artificial; identical to SEQ ID NO: 1258
  Framework sequence

SEQ ID NO: 1265 - protein, 32 aa, Artificial
  Framework sequence
RFTISRDSAKNAVNLQMELVESDDTAVYYCAA

SEQ ID NO: 1266 - protein, 32 aa, Artificial
  Framework sequence
RFTISRDSAKNTVYLQMDSLKPEDTAVYVCNA

SEQ ID NO: 1267 - protein, 32 aa, Artificial
  Framework sequence
RFTISRDNAKNSVYLQMNSLKPEDTAIYYCAA

SEQ ID NO: 1268 - protein, 32 aa, Artificial
  Framework sequence
RFTISRDNAKNTVYLQMNSLKPEDTAVYYCGA

SEQ ID NO: 1269 - protein, 32 aa, Artificial; identical to SEQ ID NO: 1268
  Framework sequence

SEQ ID NO: 1270 - protein, 32 aa, Artificial
  Framework sequence
RFTIARDDAKNTMYLQMNGMKPEDTAVYYCKM

SEQ ID NO: 1271 - protein, 32 aa, Artificial
  Framework sequence
RFDISRDNAKNTVYLQMNRLKPEDTAVYYCAA

SEQ ID NO: 1272 - protein, 32 aa, Artificial
  Framework sequence
RFAISRDNALNTVYLQMNSLKPEDTAVYYCAA

SEQ ID NO: 1273 - protein, 32 aa, Artificial
  Framework sequence
RFTISRDNGKNTVDLRMNSLKPEDTAVYYCAA

SEQ ID NO: 1274 - protein, 32 aa, Artificial; identical to SEQ ID NO: 1258
  Framework sequence

SEQ ID NO: 1275 - protein, 32 aa, Artificial
  Framework sequence
RFTISRDDAKNTVYLQMNSLKAEDTAIYYCAA

SEQ ID NO: 1276 - protein, 32 aa, Artificial
  Framework sequence
RFTVSRDNAQNTVYLQMNSLKIEDTGVYYCNA

SEQ ID NO: 1277 - protein, 32 aa, Artificial
  Framework sequence
RFTISGDDARNTVYLQMNSLNPEDTAVYYCNA

SEQ ID NO: 1278 - protein, 32 aa, Artificial
  Framework sequence
RFTISRDNSENTVYFEMGSLKPEDTAVYYCAI

SEQ ID NO: 1279 - protein, 32 aa, Artificial
  Framework sequence
RFTISRDNAKGTVYLQMSSLKPEDTAVYYCAA

SEQ ID NO: 1280 - protein, 32 aa, Artificial
  Framework sequence
RFTISRDNTKNTVYLQMNSMRPEDTAVYYCAA

SEQ ID NO: 1281 - protein, 32 aa, Artificial
  Framework sequence
RFTISRDIANDVVYLQMNSLEPEDTAVYYCAR

SEQ ID NO: 1282 - protein, 32 aa, Artificial
  Framework sequence
RFTISRDNAKNTLYLQTTSLRPEDTGVYYCAE

SEQ ID NO: 1283 - protein, 32 aa, Artificial
  Framework sequence
RFTISKDNAKNTVYLQMNSLKPEDTAVYYCAA

SEQ ID NO: 1284 - protein, 32 aa, Artificial; identical to SEQ ID NO: 1258
  Framework sequence

SEQ ID NO: 1285 - protein, 32 aa, Artificial
  Framework sequence
RFTISRDYAKNTWYLQMNTLKPEDTAAYYCAA

SEQ ID NO: 1286 - protein, 32 aa, Artificial
  Framework sequence
RFTISRDNAKNTVQLQMNSLKPEDTAVYYCAV

SEQ ID NO: 1287 - protein, 32 aa, Artificial
  Framework sequence
RFTISRDNAKNTVYLQMTSLMPEDTAVYYCAD

SEQ ID NO: 1288 - protein, 32 aa, Artificial; identical to SEQ ID NO: 1258
  Framework sequence

SEQ ID NO: 1289 - protein, 32 aa, Artificial
  Framework sequence
RFTISRDNAKDTMYLQMNVLKPEDTAVYYCAA

SEQ ID NO: 1290 - protein, 32 aa, Artificial
  Framework sequence
RFTISRDNAKNTVYLRMNSLKPEDTAVYYCAT

SEQ ID NO: 1291 - protein, 32 aa, Artificial
  Framework sequence
RFTISRDDAKNTVYLQMNSLKPEDTAVYLCAA

SEQ ID NO: 1292 - protein, 32 aa, Artificial
  Framework sequence
RVTISRDDAKNTVYLRMNSLKPEDTAVYYCAA

SEQ ID NO: 1293 - protein, 32 aa, Artificial
  Framework sequence
RFTISRDDAKNTVYLRMNSLKPEDTAVYYCAA

SEQ ID NO: 1294 - protein, 32 aa, Artificial
  Framework sequence
RFTISRDNAKNTVYLRMNSLKPEDTAVYYCAA

SEQ ID NO: 1295 - protein, 32 aa, Artificial
  Framework sequence
RFTIARDDAKNTVYLQMNSLKPEDTAVYYCAL

SEQ ID NO: 1296 - protein, 32 aa, Artificial
  Framework sequence
RFTISRDNAKNTLYLQMNSLKPEDTAVYYCAK

SEQ ID NO: 1297 - protein, 32 aa, Artificial
  Framework sequence
RFTISRDNAKNGVSLQMDSLKAEDTAVYYCAS

SEQ ID NO: 1298 - protein, 32 aa, Artificial
  Framework sequence
RFTISSDNAKNTVYLQMNSLKPEDTALYYCAR

SEQ ID NO: 1299 - protein, 32 aa, Artificial
  Framework sequence
RFTISRDDAKNTVYLQMNSLKPEDTAVYYCAA

SEQ ID NO: 1300 - protein, 32 aa, Artificial
  Framework sequence
RFTISIDNAKNTVYLQMNNLTPEDTAVYYCAA

SEQ ID NO: 1301 - protein, 32 aa, Artificial
  Framework sequence
RFTISRDNAKNTVYLQMDSLKPEDTAVYYCAA

SEQ ID NO: 1302 - protein, 32 aa, Artificial
  Framework sequence
RFTISKENAKNTVYLQMTILKPEDTAVYYCAS

SEQ ID NO: 1303 - protein, 32 aa, Artificial
  Framework sequence
RFTISRDSAKDTVYLQMNNLKPEDTAVYYCAA

SEQ ID NO: 1304 - protein, 32 aa, Artificial
  Framework sequence
RFTISRDNAKNAVNLQMSNLKPEDTALHYCTI

SEQ ID NO: 1305 - protein, 32 aa, Artificial
  Framework sequence
RFTISRDNARNAVNPQMNNLKPEDTAVYYCTI

SEQ ID NO: 1306 - protein, 32 aa, Artificial
  Framework sequence
RFTISRDNAKNAVYLQMNSLKPEDTAVYYCAA

SEQ ID NO: 1307 - protein, 32 aa, Artificial
  Framework sequence
RFTISRDNAKNAVNLQMSNLKPEDTALYYCTI

SEQ ID NO: 1308 - protein, 32 aa, Artificial
  Framework sequence
RFTISRSIAENTVYLQMNKVKPEDTAVYYCAA

SEQ ID NO: 1309 - protein, 32 aa, Artificial
  Framework sequence
RFTISRDNAKNTVYLQMNSLKPEDTAVYYCNA

SEQ ID NO: 1310 - protein, 32 aa, Artificial
  Framework sequence
RFTISRDNAKSTMYLQMNSLKPEDTAVYYCAA

SEQ ID NO: 1311 - protein, 32 aa, Artificial
  Framework sequence
RFTISRDNAKNTLYLQMNSLKAEDTAVYYCNA

SEQ ID NO: 1312 - protein, 32 aa, Artificial
  Framework sequence
RFTISRDDAKNSIYLQMNTLKPEDTAVYYCAA

SEQ ID NO: 1313 - protein, 32 aa, Artificial
  Framework sequence
RFTISRDNAKNTVYLQMNSLIPEDTAVYYCAA

SEQ ID NO: 1314 - protein, 32 aa, Artificial
  Framework sequence
RFTVSRDNGRNTVYLQMNSLKPEDTAVYYCNV

SEQ ID NO: 1315 - protein, 32 aa, Artificial
  Framework sequence
RFTISRDKAKNTVLLQMDSLKPEDTAVYYCNA

SEQ ID NO: 1316 - protein, 32 aa, Artificial
  Framework sequence
RFTISRDKAKNALYLQMNSLKPEDMAVYYCNA

SEQ ID NO: 1317 - protein, 32 aa, Artificial
  Framework sequence
RFTISRDNAKNTVYLEMNNLKPEDTAVYYCNA

SEQ ID NO: 1318 - protein, 32 aa, Artificial
  Framework sequence
RFTISRDNAENTVYLQMNNLKPEDMAVYYCNA

SEQ ID NO: 1319 - protein, 32 aa, Artificial
  Framework sequence
RFTISRDNAKSTVYLQMDSLKPEDTAVYYCAA

SEQ ID NO: 1320 - protein, 32 aa, Artificial
  Framework sequence
RFTISRDNSKNTVSLQMNSLKPEDTAVYYCAA

SEQ ID NO: 1321 - protein, 32 aa, Artificial
  Framework sequence
RFTIFRDNAENTAYLQMNSLNPEDTAVYYCAV

SEQ ID NO: 1322 - protein, 32 aa, Artificial
  Framework sequence
RFTISRDNAESTVYLQMNSLKAEDTAVYYCAA

SEQ ID NO: 1323 - protein, 32 aa, Artificial
  Framework sequence
RFAISRDGAKNTVYLQMDSLKPEDTAVYYCNL

SEQ ID NO: 1324 - protein, 32 aa, Artificial
  Framework sequence
RFAISRDNAKNTVYLQMHSLKPEDTAVYHCAT

SEQ ID NO: 1325 - protein, 32 aa, Artificial
  Framework sequence
RFTISRDNADNTVTLQMNSLKPEDTAVYYCAG

SEQ ID NO: 1326 - protein, 32 aa, Artificial; identical to SEQ ID NO: 1325
  Framework sequence

SEQ ID NO: 1327 - protein, 32 aa, Artificial
  Framework sequence
RFTISRDNAEDLLYLQMNLLKPEDTAVYYCAA

SEQ ID NO: 1328 - protein, 32 aa, Artificial
  Framework sequence
RFTISKNTAENTVYLQMNSLKPEDTAVYYCAV

SEQ ID NO: 1329 - protein, 32 aa, Artificial
  Framework sequence
RFTISRANDNNPLYLQMNTLKPEDTAVYYCAA

SEQ ID NO: 1330 - protein, 32 aa, Artificial
  Framework sequence
RFTISRDNAINSLYLQMDTLKPEDTAVYYCAA

SEQ ID NO: 1331 - protein, 32 aa, Artificial
  Framework sequence
RFSISRDNALKTVYLQMNSLKPEDTAVYYCYA

SEQ ID NO: 1332 - protein, 32 aa, Artificial
  Framework sequence
RFTISRDYDNSPVYLQMNTLKPEDTAVYYCAA

SEQ ID NO: 1333 - protein, 32 aa, Artificial
  Framework sequence
RFTISRDNAKNTVYLQMNSLEREDTAVYYCAA

SEQ ID NO: 1334 - protein, 32 aa, Artificial
  Framework sequence
RFTISRDNAKNTVTLQMNSLRPEDTAVYYCAA

SEQ ID NO: 1335 - protein, 32 aa, Artificial
  Framework sequence
RFTISRDNAKNSVYLQMNSLKPEDTSVYYCNV

SEQ ID NO: 1336 - protein, 32 aa, Artificial
  Framework sequence
RFTISRDNARNTVYLQMNSLKPEDTAVYYCAA

SEQ ID NO: 1337 - protein, 32 aa, Artificial; identical to SEQ ID NO: 1258
  Framework sequence

SEQ ID NO: 1338 - protein, 32 aa, Artificial
  Framework sequence
RFTISRDNAKNAVYLQMNSLKPEDTGVYYCAT

SEQ ID NO: 1339 - protein, 32 aa, Artificial; identical to SEQ ID NO: 1258
  Framework sequence

SEQ ID NO: 1340 - protein, 32 aa, Artificial
  Framework sequence
RFTISRDNTKNTIDLQINSLKPEDTAVYYCAA

SEQ ID NO: 1341 - protein, 32 aa, Artificial; identical to SEQ ID NO: 1340
  Framework sequence

SEQ ID NO: 1342 - protein, 32 aa, Artificial
  Framework sequence
RFIVSRDNAKNTADLQMNDLKPEDTAVYYCGA

SEQ ID NO: 1343 - protein, 32 aa, Artificial
  Framework sequence
RFIVSRDNAKNTADLQMNELKPEDTAVYYCGA

SEQ ID NO: 1344 - protein, 32 aa, Artificial
  Framework sequence
RFTISRDDAKNTVFLQMNSLKPEDTAVYYCNV

SEQ ID NO: 1345 - protein, 32 aa, Artificial
  Framework sequence
RFTISRENVKDTMYLQMNSLQAEDTGVYYCVR

SEQ ID NO: 1346 - protein, 32 aa, Artificial
  Framework sequence
RFTISRDNARNTAYLQMDSLRPEDTAVYSCAA

SEQ ID NO: 1347 - protein, 32 aa, Artificial
  Framework sequence
RFTISRGNAKNTVNLQMNSLKPEDTAVYYCAA

SEQ ID NO: 1348 - protein, 32 aa, Artificial
  Framework sequence
RFTISRDNTESTGYLQMNNLKPEDTAVYYCAA

SEQ ID NO: 1349 - protein, 32 aa, Artificial
  Framework sequence
RFTISRDNAKNMVYLQMNSLKPEDTAVYYCAA

SEQ ID NO: 1350 - protein, 32 aa, Artificial
  Framework sequence
RFTISRDYAKNTAYLQMNSLKPEDTAVYYCVA

SEQ ID NO: 1351 - protein, 32 aa, Artificial
  Framework sequence
RFTISRDNAENTVYLQMNSLTPEDTAVYYCAS

SEQ ID NO: 1352 - protein, 32 aa, Artificial
  Framework sequence
RFTISRDNAENTVYLLMNSLIPEDTAVYYCAT

SEQ ID NO: 1353 - protein, 32 aa, Artificial
  Framework sequence
RFTIYRDNAQNTMYLQMNSLKPEDTAVYYCAA

SEQ ID NO: 1354 - protein, 32 aa, Artificial
  Framework sequence
RFTVSRDNAKNTVYLQMNSLKPEDTAVYYCNA

SEQ ID NO: 1355 - protein, 32 aa, Artificial
  Framework sequence
RSTISRENAENTVYLQMNSLKPEDTAVYYCAA

SEQ ID NO: 1356 - protein, 32 aa, Artificial
  Framework sequence
RFTISRDNAKKTAYLQMNSLRPEDTAVYYCVG

SEQ ID NO: 1357 - protein, 32 aa, Artificial
  Framework sequence
RFTISRDNTKNTVYLQMNSLKPEDTAVYYCRP

SEQ ID NO: 1358 - protein, 32 aa, Artificial
  Framework sequence
RFTISRDNAKNTVDLQMSSLKPEDTAAYYCAA

SEQ ID NO: 1359 - protein, 32 aa, Artificial
  Framework sequence
RFTISRDNAENLVYLQMNNLKPEDTAVYYCSA

SEQ ID NO: 1360 - protein, 32 aa, Artificial
  Framework sequence
RFTISRDAAANLVYLQMNSLKPSDTAIYSCNA

SEQ ID NO: 1361 - protein, 32 aa, Artificial
  Framework sequence
RFIISRDNAKNTVYLQINSLKPEDTAVYYCAA

SEQ ID NO: 1362 - protein, 32 aa, Artificial
  Framework sequence
RFTISRDNAKNTVYLQMNNLKSEDTAVYYCAP

SEQ ID NO: 1363 - protein, 32 aa, Artificial
  Framework sequence
RFTFSRDNAKNTVYLQMNSLKPEDTAIYLCAV

SEQ ID NO: 1364 - protein, 32 aa, Artificial
  Framework sequence
RFTISRDNAKNTVYLQMNSLKPEDTAVYYCAC

SEQ ID NO: 1365 - protein, 32 aa, Artificial
  Framework sequence
RFTIYRDNAKNVVYLQMSVLNGEDTAVYYCAA

SEQ ID NO: 1366 - protein, 32 aa, Artificial; identical to SEQ ID NO: 1258
  Framework sequence

SEQ ID NO: 1367 - protein, 32 aa, Artificial
  Framework sequence
RFTISRDEAKNTVYLEMNSLKTDDTAVYYCAA

SEQ ID NO: 1368 - protein, 32 aa, Artificial
  Framework sequence
RFTISRDNAKTTVYLQMNSLQPEDTARYYCRY

SEQ ID NO: 1369 - protein, 32 aa, Artificial; identical to SEQ ID NO: 1368
  Framework sequence

SEQ ID NO: 1370 - protein, 32 aa, Artificial
  Framework sequence
RFTISRDNAKNTVYLQMNSLKPEDTAVYYCYA

SEQ ID NO: 1371 - protein, 32 aa, Artificial
  Framework sequence
RLPISSDNAKKTVYLQMDSLKPEDTAVYYCAA

SEQ ID NO: 1372 - protein, 32 aa, Artificial
  Framework sequence
RFTISRDNDENMLYLQMNSLKPEDTAVYYCAT

SEQ ID NO: 1373 - protein, 32 aa, Artificial
  Framework sequence
RFTISRDNAKNTVFLQMNSLKPEDTAIYYCAA

SEQ ID NO: 1374 - protein, 32 aa, Artificial
  Framework sequence
RFATSSDSAKNTVYLQMHSLKPEDTAVYYCAT

SEQ ID NO: 1375 - protein, 32 aa, Artificial
  Framework sequence
RFIISRDDSKNTVDLQMNSLKPEDTAVYYCNL

SEQ ID NO: 1376 - protein, 9 aa, Artificial
  CDR sequence
GWKIVPTNP

SEQ ID NO: 1377 - protein, 9 aa, Artificial
  CDR sequence
GWKIRPTIP

SEQ ID NO: 1378 - protein, 9 aa, Artificial
  CDR sequence
GWKIVPTDL

SEQ ID NO: 1379 - protein, 9 aa, Artificial
  CDR sequence
GWKIVPTDR

SEQ ID NO: 1380 - protein, 9 aa, Artificial
  CDR sequence
GWKIVPTDR

SEQ ID NO: 1381 - protein, 9 aa, Artificial
  CDR sequence
GWKIVPTDR

SEQ ID NO: 1382 - protein, 9 aa, Artificial
  CDR sequence
GWKIVPTDR

SEQ ID NO: 1383 - protein, 9 aa, Artificial
  CDR sequence
GWKIVPTDR

SEQ ID NO: 1384 - protein, 9 aa, Artificial
  CDR sequence
GWKIVPTDR

SEQ ID NO: 1385 - protein, 9 aa, Artificial
  CDR sequence
GWKIVPTDR

SEQ ID NO: 1386 - protein, 9 aa, Artificial
  CDR sequence
GWKIVPMDR

SEQ ID NO: 1387 - protein, 9 aa, Artificial
  CDR sequence
GWKIIPTDR

SEQ ID NO: 1388 - protein, 9 aa, Artificial
  CDR sequence
GWKILPTDR

SEQ ID NO: 1389 - protein, 9 aa, Artificial
  CDR sequence
GWKILPTNR

SEQ ID NO: 1390 - protein, 9 aa, Artificial
  CDR sequence
GWKILPTNR

SEQ ID NO: 1391 - protein, 9 aa, Artificial
  CDR sequence
GWKILPTNR

SEQ ID NO: 1392 - protein, 9 aa, Artificial
  CDR sequence
GWKIIPTDR

SEQ ID NO: 1393 - protein, 9 aa, Artificial
  CDR sequence
GWKIIPTDR

SEQ ID NO: 1394 - protein, 9 aa, Artificial
  CDR sequence
GWKIIPTDR

SEQ ID NO: 1395 - protein, 9 aa, Artificial
  CDR sequence
GWKIIPTDR

SEQ ID NO: 1396 - protein, 9 aa, Artificial
  CDR sequence
GWKIIPTDR

SEQ ID NO: 1397 - protein, 9 aa, Artificial
  CDR sequence
GWKIIPTDR

SEQ ID NO: 1398 - protein, 9 aa, Artificial
  CDR sequence
GWKIIPTDR

SEQ ID NO: 1399 - protein, 9 aa, Artificial
  CDR sequence
GWKVWPTDR

SEQ ID NO: 1400 - protein, 9 aa, Artificial
  CDR sequence
GWKVWPTDR

SEQ ID NO: 1401 - protein, 9 aa, Artificial
  CDR sequence
GWKILPAER

SEQ ID NO: 1402 - protein, 9 aa, Artificial
  CDR sequence
GWKILPAER

SEQ ID NO: 1403 - protein, 9 aa, Artificial
  CDR sequence
GWKILPAER

SEQ ID NO: 1404 - protein, 9 aa, Artificial
  CDR sequence
GWKIHPADR

SEQ ID NO: 1405 - protein, 9 aa, Artificial
  CDR sequence
GWKILPAER

SEQ ID NO: 1406 - protein, 9 aa, Artificial
  CDR sequence
GWKIRPTIP

SEQ ID NO: 1407 - protein, 11 aa, Artificial
  CDR sequence
GWQSTTKNQGY

SEQ ID NO: 1408 - protein, 11 aa, Artificial
  CDR sequence
GWQSTTKNQGY

SEQ ID NO: 1409 - protein, 11 aa, Artificial
  CDR sequence
GWQSTTKSQGY

SEQ ID NO: 1410 - protein, 11 aa, Artificial
  CDR sequence
GWQSTTKNQNY

SEQ ID NO: 1411 - protein, 15 aa, Artificial
  CDR sequence
NWRDAGTTWFEKSGS

SEQ ID NO: 1412 - protein, 15 aa, Artificial
  CDR sequence
NWRDAGTTWFEKSGS

SEQ ID NO: 1413 - protein, 15 aa, Artificial
  CDR sequence
NWRDAGTTWFEKSGS

SEQ ID NO: 1414 - protein, 15 aa, Artificial
  CDR sequence
NWRDAGTTWFEKSGS

SEQ ID NO: 1415 - protein, 15 aa, Artificial
  CDR sequence
NWRDAGTTWFEKSGS

SEQ ID NO: 1416 - protein, 15 aa, Artificial
  CDR sequence
NWRDAGTTWFEKSGS

SEQ ID NO: 1417 - protein, 15 aa, Artificial
  CDR sequence
NWRDAGTTWFEKSGS

SEQ ID NO: 1418 - protein, 15 aa, Artificial
  CDR sequence
NWGDAGTTWFEKSGS

SEQ ID NO: 1419 - protein, 15 aa, Artificial
  CDR sequence
NWGDAGTTWFEKSGS

SEQ ID NO: 1420 - protein, 15 aa, Artificial
  CDR sequence
NWGDAGTTWFEKSGS

SEQ ID NO: 1421 - protein, 15 aa, Artificial
  CDR sequence
NWGDAGTTWFEKSGS

SEQ ID NO: 1422 - protein, 15 aa, Artificial
  CDR sequence
NWGDAGTTWFEKSGS

SEQ ID NO: 1423 - protein, 15 aa, Artificial
  CDR sequence
NWGDAGTTWFEKSGS

SEQ ID NO: 1424 - protein, 15 aa, Artificial
  CDR sequence
NWGDAGTTWFEKSGS

SEQ ID NO: 1425 - protein, 15 aa, Artificial
  CDR sequence
NWGDAGTTWFEKSGS

SEQ ID NO: 1426 - protein, 15 aa, Artificial
  CDR sequence
NWGDAGTTWFEKSGS

SEQ ID NO: 1427 - protein, 15 aa, Artificial
  CDR sequence
NWGDAGTTWFEKSGS

SEQ ID NO: 1428 - protein, 15 aa, Artificial
  CDR sequence
NWGDAGTTWFEKSGS

SEQ ID NO: 1429 - protein, 15 aa, Artificial
  CDR sequence
NWGDAGTTWFEKSGS

SEQ ID NO: 1430 - protein, 15 aa, Artificial
  CDR sequence
NWGDAGTTWFEKSGS

SEQ ID NO: 1431 - protein, 15 aa, Artificial
  CDR sequence
NWGDAGTTWFEKSGS

SEQ ID NO: 1432 - protein, 15 aa, Artificial
  CDR sequence
NWGDAGTTWFEKSGS

SEQ ID NO: 1433 - protein, 15 aa, Artificial
  CDR sequence
NWGDAGTTWFEKSGS

SEQ ID NO: 1434 - protein, 15 aa, Artificial
  CDR sequence
NWGDAGTTWFEKSGS

SEQ ID NO: 1435 - protein, 15 aa, Artificial
  CDR sequence
NWGDAGTTWFEKSGS

SEQ ID NO: 1436 - protein, 15 aa, Artificial
  CDR sequence
NWRDAGTTWFEKSGS

SEQ ID NO: 1437 - protein, 10 aa, Artificial
  CDR sequence
FRTAAQGTDY

SEQ ID NO: 1438 - protein, 18 aa, Artificial
  CDR sequence
HKTPYTTLELNRPHAFGS

SEQ ID NO: 1439 - protein, 11 aa, Artificial
  CDR sequence
DQRLDGSTLAY

SEQ ID NO: 1440 - protein, 15 aa, Artificial
  CDR sequence
ETYGSGSSLMTEYDY

SEQ ID NO: 1441 - protein, 15 aa, Artificial
  CDR sequence
ETYGSGSSLMSEYDY

SEQ ID NO: 1442 - protein, 15 aa, Artificial
  CDR sequence
ETYGSGSSLMSEYDY

SEQ ID NO: 1443 - protein, 15 aa, Artificial
  CDR sequence
ETYGSGSSLMSEYDY

SEQ ID NO: 1444 - protein, 15 aa, Artificial
  CDR sequence
ETFGSGSSLMSEYDY

SEQ ID NO: 1445 - protein, 15 aa, Artificial
  CDR sequence
DTYGSGSSLMNEYDY

SEQ ID NO: 1446 - protein, 15 aa, Artificial
  CDR sequence
ETYGSGSSLMNEYDY

SEQ ID NO: 1447 - protein, 15 aa, Artificial
  CDR sequence
ETYGSGSSLMNEYDY

SEQ ID NO: 1448 - protein, 15 aa, Artificial
  CDR sequence
ETYGSGSSLMNEYDY

SEQ ID NO: 1449 - protein, 15 aa, Artificial
  CDR sequence
EPYGSGSSLISEYDY

SEQ ID NO: 1450 - protein, 15 aa, Artificial
  CDR sequence
EPYGSGSSLISEYDY

SEQ ID NO: 1451 - protein, 15 aa, Artificial
  CDR sequence
EPYGSGSSLMSEYDY

SEQ ID NO: 1452 - protein, 12 aa, Artificial
  CDR sequence
NWKMLLGVENDY

SEQ ID NO: 1453 - protein, 14 aa, Artificial
  CDR sequence
KIGWLSIRGDEYEY

SEQ ID NO: 1454 - protein, 19 aa, Artificial
  CDR sequence
LPFVCPSGSYSDYGDEYDY

SEQ ID NO: 1455 - protein, 12 aa, Artificial
  CDR sequence
HVSDSDYTEYDY

SEQ ID NO: 1456 - protein, 16 aa, Artificial
  CDR sequence
RRSSLYTSSNVFEYDY

SEQ ID NO: 1457 - protein, 5 aa, Artificial
  CDR sequence
VNADY

SEQ ID NO: 1458 - protein, 5 aa, Artificial
  CDR sequence
VNADY

SEQ ID NO: 1459 - protein, 5 aa, Artificial
  CDR sequence
VNADY

SEQ ID NO: 1460 - protein, 5 aa, Artificial
  CDR sequence
VNADY

SEQ ID NO: 1461 - protein, 5 aa, Artificial
  CDR sequence
VNADY

SEQ ID NO: 1462 - protein, 5 aa, Artificial
  CDR sequence
VNGDI

SEQ ID NO: 1463 - protein, 5 aa, Artificial
  CDR sequence
VNGDI

SEQ ID NO: 1464 - protein, 5 aa, Artificial
  CDR sequence
VNADI

SEQ ID NO: 1465 - protein, 5 aa, Artificial
  CDR sequence
VNGDY

SEQ ID NO: 1466 - protein, 5 aa, Artificial
  CDR sequence
VNGDY

SEQ ID NO: 1467 - protein, 5 aa, Artificial
  CDR sequence
VNGDY

SEQ ID NO: 1468 - protein, 5 aa, Artificial
  CDR sequence
VNGDY

SEQ ID NO: 1469 - protein, 5 aa, Artificial
  CDR sequence
VNGDY

SEQ ID NO: 1470 - protein, 12 aa, Artificial
  CDR sequence
VWKLPRFVDNDY

SEQ ID NO: 1471 - protein, 12 aa, Artificial
  CDR sequence
NWKMLLGVENDY

SEQ ID NO: 1472 - protein, 12 aa, Artificial
  CDR sequence
NWKMLLGVENDY

SEQ ID NO: 1473 - protein, 5 aa, Artificial
  CDR sequence
VNRDY

SEQ ID NO: 1474 - protein, 5 aa, Artificial
  CDR sequence
VNRDY

SEQ ID NO: 1475 - protein, 5 aa, Artificial
  CDR sequence
VNRDY

SEQ ID NO: 1476 - protein, 5 aa, Artificial
  CDR sequence
VNRDY

SEQ ID NO: 1477 - protein, 5 aa, Artificial
  CDR sequence
VNRDY

SEQ ID NO: 1478 - protein, 5 aa, Artificial
  CDR sequence
VNRDY

SEQ ID NO: 1479 - protein, 5 aa, Artificial
  CDR sequence
VNRDY

SEQ ID NO: 1480 - protein, 5 aa, Artificial
  CDR sequence
VNRDY

SEQ ID NO: 1481 - protein, 5 aa, Artificial
  CDR sequence
VNRDY

SEQ ID NO: 1482 - protein, 5 aa, Artificial
  CDR sequence
VNRDY

SEQ ID NO: 1483 - protein, 5 aa, Artificial
  CDR sequence
VNRDY

SEQ ID NO: 1484 - protein, 5 aa, Artificial
  CDR sequence
VNRDY

SEQ ID NO: 1485 - protein, 5 aa, Artificial
  CDR sequence
VNRDY

SEQ ID NO: 1486 - protein, 5 aa, Artificial
  CDR sequence
VNREY

SEQ ID NO: 1487 - protein, 5 aa, Artificial
  CDR sequence
VNREY

SEQ ID NO: 1488 - protein, 5 aa, Artificial
  CDR sequence
VNREY

SEQ ID NO: 1489 - protein, 14 aa, Artificial
  CDR sequence
KPGWVARDPSQYNY

SEQ ID NO: 1490 - protein, 14 aa, Artificial
  CDR sequence
KPGWVARDPSEYNY

SEQ ID NO: 1491 - protein, 5 aa, Artificial
  CDR sequence
FNRDL

SEQ ID NO: 1492 - protein, 5 aa, Artificial
  CDR sequence
VNRDL

SEQ ID NO: 1493 - protein, 13 aa, Artificial
  CDR sequence
DANPNCGLNVWNS

SEQ ID NO: 1494 - protein, 8 aa, Artificial
  CDR sequence
RDYYYMPF

SEQ ID NO: 1495 - protein, 5 aa, Artificial
  CDR sequence
INEDQ

SEQ ID NO: 1496 - protein, 5 aa, Artificial
  CDR sequence
INEDQ

SEQ ID NO: 1497 - protein, 5 aa, Artificial
  CDR sequence
INEDQ

SEQ ID NO: 1498 - protein, 5 aa, Artificial
  CDR sequence
INEDQ

SEQ ID NO: 1499 - protein, 5 aa, Artificial
  CDR sequence
INADQ

SEQ ID NO: 1500 - protein, 5 aa, Artificial
  CDR sequence
INRDI

SEQ ID NO: 1501 - protein, 5 aa, Artificial
  CDR sequence
INHDI

SEQ ID NO: 1502 - protein, 5 aa, Artificial
  CDR sequence
INRDY

SEQ ID NO: 1503 - protein, 5 aa, Artificial
  CDR sequence
INRDY

SEQ ID NO: 1504 - protein, 5 aa, Artificial
  CDR sequence
INRDY

SEQ ID NO: 1505 - protein, 5 aa, Artificial
  CDR sequence
INGDY

SEQ ID NO: 1506 - protein, 5 aa, Artificial
  CDR sequence
INGDY

SEQ ID NO: 1507 - protein, 5 aa, Artificial
  CDR sequence
TNGDY

SEQ ID NO: 1508 - protein, 12 aa, Artificial
  CDR sequence
DISTFGWGPFDY

SEQ ID NO: 1509 - protein, 9 aa, Artificial
  CDR sequence
RWDIVGAIW

SEQ ID NO: 1510 - protein, 9 aa, Artificial
  CDR sequence
RWDIVGAIW

SEQ ID NO: 1511 - protein, 9 aa, Artificial
  CDR sequence
RWLEIGAEY

SEQ ID NO: 1512 - protein, 9 aa, Artificial
  CDR sequence
SWSYPGLTY

SEQ ID NO: 1513 - protein, 9 aa, Artificial
  CDR sequence
VWRAIGRTY

SEQ ID NO: 1514 - protein, 10 aa, Artificial
  CDR sequence
DRRSYNGRQY

SEQ ID NO: 1515 - protein, 14 aa, Artificial
  CDR sequence
GGREYSGVYYYREY

SEQ ID NO: 1516 - protein, 13 aa, Artificial
  CDR sequence
RPSDTTWSESSAS

SEQ ID NO: 1517 - protein, 12 aa, Artificial
  CDR sequence
DLGNSGRGPYTN

SEQ ID NO: 1518 - protein, 13 aa, Artificial
  CDR sequence
DCGVPGFGWTFSS

SEQ ID NO: 1519 - protein, 9 aa, Artificial
  CDR sequence
KQLPYLQNF

SEQ ID NO: 1520 - protein, 9 aa, Artificial
  CDR sequence
KQLPYLQNF

SEQ ID NO: 1521 - protein, 7 aa, Artificial
  CDR sequence
HRWGLNY

SEQ ID NO: 1522 - protein, 12 aa, Artificial
  CDR sequence
ARSSSSYYDFGS

SEQ ID NO: 1523 - protein, 12 aa, Artificial
  CDR sequence
ARSSSSYYDFGS

SEQ ID NO: 1524 - protein, 13 aa, Artificial
  CDR sequence
DRGSGTCYADFGS

SEQ ID NO: 1525 - protein, 11 aa, Artificial
  CDR sequence
GWGPAVTSIPV

SEQ ID NO: 1526 - protein, 5 aa, Artificial
  CDR sequence
INRDI

SEQ ID NO: 1527 - protein, 5 aa, Artificial
  CDR sequence
INRDI

SEQ ID NO: 1528 - protein, 5 aa, Artificial
  CDR sequence
INRDI

SEQ ID NO: 1529 - protein, 5 aa, Artificial
  CDR sequence
INRDI

SEQ ID NO: 1530 - protein, 15 aa, Artificial
  CDR sequence
SRDYSRSRDPTSYDR

SEQ ID NO: 1531 - protein, 13 aa, Artificial
  CDR sequence
PRGSSLYLLEYDY

SEQ ID NO: 1532 - protein, 13 aa, Artificial
  CDR sequence
DFYLATLAHEYDY

SEQ ID NO: 1533 - protein, 13 aa, Artificial
  CDR sequence
DFYVSTLAHEYDY

SEQ ID NO: 1534 - protein, 13 aa, Artificial
  CDR sequence
DFYVSTLAHEYDY

SEQ ID NO: 1535 - protein, 13 aa, Artificial
  CDR sequence
DFYVSTLAHEYDY

SEQ ID NO: 1536 - protein, 14 aa, Artificial
  CDR sequence
DTFTLSTLSHEYDY

SEQ ID NO: 1537 - protein, 13 aa, Artificial
  CDR sequence
DLIVATLPGEYDY

SEQ ID NO: 1538 - protein, 13 aa, Artificial
  CDR sequence
DEILATLPHEYDY

SEQ ID NO: 1539 - protein, 15 aa, Artificial
  CDR sequence
DAYTVIATLPHEYDY

SEQ ID NO: 1540 - protein, 14 aa, Artificial
  CDR sequence
KHSTVAGLTHEYDY

SEQ ID NO: 1541 - protein, 12 aa, Artificial
  CDR sequence
VYVSTWGNGYDY

SEQ ID NO: 1542 - protein, 17 aa, Artificial
  CDR sequence
RRSGYYSLSTSPHQYAY

SEQ ID NO: 1543 - protein, 16 aa, Artificial
  CDR sequence
RVNYAAYSRLEHDYHY

SEQ ID NO: 1544 - protein, 16 aa, Artificial
  CDR sequence
RVNYAAYSRLEHDYHY

SEQ ID NO: 1545 - protein, 8 aa, Artificial
  CDR sequence
NRAGIYEY

SEQ ID NO: 1546 - protein, 14 aa, Artificial
  CDR sequence
RLFMATPNQGQYYY

SEQ ID NO: 1547 - protein, 14 aa, Artificial
  CDR sequence
RPSYSTNNVKSYRY

SEQ ID NO: 1548 - protein, 14 aa, Artificial
  CDR sequence
RPAVVHTRKESYPY

SEQ ID NO: 1549 - protein, 16 aa, Artificial
  CDR sequence
RINYSVLTTTSSSYHY

SEQ ID NO: 1550 - protein, 16 aa, Artificial
  CDR sequence
DFRSTWLSSSGSSYTY

SEQ ID NO: 1551 - protein, 13 aa, Artificial
  CDR sequence
RRIVNVEGAYRDY

SEQ ID NO: 1552 - protein, 13 aa, Artificial
  CDR sequence
KVVVAVEGAKYDY

SEQ ID NO: 1553 - protein, 15 aa, Artificial
  CDR sequence
CRISWCAGAESDYGY

SEQ ID NO: 1554 - protein, 18 aa, Artificial
  CDR sequence
DSITDRRSVAVAHTSYYY

SEQ ID NO: 1555 - protein, 14 aa, Artificial
  CDR sequence
RLSSVAVASTRYDY

SEQ ID NO: 1556 - protein, 16 aa, Artificial
  CDR sequence
NRQSGVASENLRLYTY

SEQ ID NO: 1557 - protein, 14 aa, Artificial
  CDR sequence
DKQSGVSVNPKYAY

SEQ ID NO: 1558 - protein, 10 aa, Artificial
  CDR sequence
QTLGRSLYDY

SEQ ID NO: 1559 - protein, 17 aa, Artificial
  CDR sequence
SRYSGGVATARRSEYHY

SEQ ID NO: 1560 - protein, 16 aa, Artificial
  CDR sequence
VATYSRNVGSVRNYDY

SEQ ID NO: 1561 - protein, 17 aa, Artificial
  CDR sequence
SQPLNYYTYYDARRYDY

SEQ ID NO: 1562 - protein, 16 aa, Artificial
  CDR sequence
TPVYYQRYYDQNAYDY

SEQ ID NO: 1563 - protein, 10 aa, Artificial
  CDR sequence
KYYSYYAYDY

SEQ ID NO: 1564 - protein, 16 aa, Artificial
  CDR sequence
SPVYYIDYSSQYKYGY

SEQ ID NO: 1565 - protein, 16 aa, Artificial
  CDR sequence
QIYYRTNYYSQNAYDY

SEQ ID NO: 1566 - protein, 16 aa, Artificial
  CDR sequence
QIYYRTNYYSQNNYDY

SEQ ID NO: 1567 - protein, 16 aa, Artificial
  CDR sequence
QIYYRTNYYSQNVYDY

SEQ ID NO: 1568 - protein, 16 aa, Artificial
  CDR sequence
QIYYRTNYYSQNEYDY

SEQ ID NO: 1569 - protein, 16 aa, Artificial
  CDR sequence
QIYYRTNYSSQSNYDY

SEQ ID NO: 1570 - protein, 16 aa, Artificial
  CDR sequence
ATAYRTNYSSRDKYDY

SEQ ID NO: 1571 - protein, 13 aa, Artificial
  CDR sequence
YLSFYSDYEVYDY

SEQ ID NO: 1572 - protein, 11 aa, Artificial
  CDR sequence
DPTYGSGRWTY

SEQ ID NO: 1573 - protein, 19 aa, Artificial
  CDR sequence
SVTYYSGSHAYTQEGGYAR

SEQ ID NO: 1574 - protein, 17 aa, Artificial
  CDR sequence
RQPYASGSHYSSTQYTY

SEQ ID NO: 1575 - protein, 10 aa, Artificial
  CDR sequence
LYRGRSVYDD

SEQ ID NO: 1576 - protein, 18 aa, Artificial
  CDR sequence
SSYGSTYYSQGRAYYYDY

SEQ ID NO: 1577 - protein, 15 aa, Artificial
  CDR sequence
SPYGPLYRSTHYYDY

SEQ ID NO: 1578 - protein, 18 aa, Artificial
  CDR sequence
TTYYSGSYISTLSTSYNY

SEQ ID NO: 1579 - protein, 3 aa, Artificial
  CDR sequence
GSY

SEQ ID NO: 1580 - protein, 3 aa, Artificial
  CDR sequence
GSY

SEQ ID NO: 1581 - protein, 18 aa, Artificial
  CDR sequence
RDSSTLDSTYYVGGSYNY

SEQ ID NO: 1582 - protein, 3 aa, Artificial
  CDR sequence
GSY

SEQ ID NO: 1583 - protein, 16 aa, Artificial
  CDR sequence
RMYGSDWLPRPEDFDS

SEQ ID NO: 1584 - protein, 12 aa, Artificial
  CDR sequence
DVSPSYGSRWYG

SEQ ID NO: 1585 - protein, 18 aa, Artificial
  CDR sequence
RREYSTIYTARYPGEYVY

SEQ ID NO: 1586 - protein, 8 aa, Artificial
  CDR sequence
RERGIYDS

SEQ ID NO: 1587 - protein, 16 aa, Artificial
  CDR sequence
DDYLGGDNWYLGPYDS

SEQ ID NO: 1588 - protein, 15 aa, Artificial
  CDR sequence
RKTYRSLTYYGEYDS

SEQ ID NO: 1589 - protein, 17 aa, Artificial
  CDR sequence
DRLLYYSSGYYQTSVDV

SEQ ID NO: 1590 - protein, 17 aa, Artificial
  CDR sequence
DRFLYYSAGRYDTGSDI

SEQ ID NO: 1591 - protein, 17 aa, Artificial
  CDR sequence
DRVLYYSDSRYYTGSNY

SEQ ID NO: 1592 - protein, 19 aa, Artificial
  CDR sequence
DRALYRNYSDGRYYTGYDY

SEQ ID NO: 1593 - protein, 7 aa, Artificial
  CDR sequence
RILSRNY

SEQ ID NO: 1594 - protein, 18 aa, Artificial
  CDR sequence
SRRFYSGLYYYTDDAYEY

SEQ ID NO: 1595 - protein, 18 aa, Artificial
  CDR sequence
SRRFYSGLVYYSVDAYEN

SEQ ID NO: 1596 - protein, 18 aa, Artificial
  CDR sequence
TKRYYSIKYYSTVEDYEY

SEQ ID NO: 1597 - protein, 19 aa, Artificial
  CDR sequence
NRYYCSTYGCLSTPRQYDY

SEQ ID NO: 1598 - protein, 12 aa, Artificial
  CDR sequence
RVYTGTYGGRNY

SEQ ID NO: 1599 - protein, 9 aa, Artificial
  CDR sequence
GYSLPAFDS

SEQ ID NO: 1600 - protein, 9 aa, Artificial
  CDR sequence
GIDLYTFHY

SEQ ID NO: 1601 - protein, 9 aa, Artificial
  CDR sequence
GIDLYTFDY

SEQ ID NO: 1602 - protein, 17 aa, Artificial
  CDR sequence
NSDSGFDSYSVWAAYEY

SEQ ID NO: 1603 - protein, 10 aa, Artificial
  CDR sequence
LLTVWDTYKY

SEQ ID NO: 1604 - protein, 17 aa, Artificial
  CDR sequence
TNRWYTGVYDLPSRYEY

SEQ ID NO: 1605 - protein, 17 aa, Artificial
  CDR sequence
TNRWFSAVYDLPSRYTY

SEQ ID NO: 1606 - protein, 6 aa, Artificial
  CDR sequence
DLPSRL

SEQ ID NO: 1607 - protein, 17 aa, Artificial
  CDR sequence
TSRWYSAVYDLPTRYDY

SEQ ID NO: 1608 - protein, 16 aa, Artificial
  CDR sequence
DRSYSIDYRHPDSYSY

SEQ ID NO: 1609 - protein, 15 aa, Artificial
  CDR sequence
DPLLFYGVGSADVDY

SEQ ID NO: 1610 - protein, 9 aa, Artificial
  CDR sequence
ISGLVQRDY

SEQ ID NO: 1611 - protein, 15 aa, Artificial
  CDR sequence
GGHLLGYDVQWEPDY

SEQ ID NO: 1612 - protein, 16 aa, Artificial
  CDR sequence
HKRTYELGAHSTDFGS

SEQ ID NO: 1613 - protein, 17 aa, Artificial
  CDR sequence
AVFVDSGDFSVCRGVGY

SEQ ID NO: 1614 - protein, 12 aa, Artificial
  CDR sequence
LRSWPRGVDSGS

SEQ ID NO: 1615 - protein, 14 aa, Artificial
  CDR sequence
DVIYKNIGSGSFDY

SEQ ID NO: 1616 - protein, 14 aa, Artificial
  CDR sequence
DVIYKNIGSGSFDY

SEQ ID NO: 1617 - protein, 14 aa, Artificial
  CDR sequence
SKWYGGFGDTDIEY

SEQ ID NO: 1618 - protein, 14 aa, Artificial
  CDR sequence
SKWYGGFGDTDIEY

SEQ ID NO: 1619 - protein, 6 aa, Artificial
  CDR sequence
DGPFGN

SEQ ID NO: 1620 - protein, 16 aa, Artificial
  CDR sequence
SRHSGNTLSFSLKYDY

SEQ ID NO: 1621 - protein, 16 aa, Artificial
  CDR sequence
RRWSGTLSLFDNEYYY

SEQ ID NO: 1622 - protein, 12 aa, Artificial
  CDR sequence
DNYRDSYLEYDY

SEQ ID NO: 1623 - protein, 16 aa, Artificial
  CDR sequence
SWDHGDYVDGGFFYDY

SEQ ID NO: 1624 - protein, 15 aa, Artificial
  CDR sequence
AGSAGPPSIDRQYDY

SEQ ID NO: 1625 - protein, 10 aa, Artificial
  CDR sequence
DVRDSIWRSY

SEQ ID NO: 1626 - protein, 11 aa, Artificial
  CDR sequence
GWGATQAQSGF

SEQ ID NO: 1627 - protein, 11 aa, Artificial
  CDR sequence
GWGATQAQHGF

SEQ ID NO: 1628 - protein, 12 aa, Artificial
  CDR sequence
SSSLATISQPSS

SEQ ID NO: 1629 - protein, 10 aa, Artificial
  CDR sequence
KAVTSRDHEY

SEQ ID NO: 1630 - protein, 19 aa, Artificial
  CDR sequence
NSDEFYSGTLKLQSRMVEY

SEQ ID NO: 1631 - protein, 9 aa, Artificial
  CDR sequence
GWKTDEYVK

SEQ ID NO: 1632 - protein, 11 aa, Artificial
  CDR sequence
GWVTPSYEYGN

SEQ ID NO: 1633 - protein, 19 aa, Artificial
  CDR sequence
DQKYGMSYSRLWLVSEYEY

SEQ ID NO: 1634 - protein, 7 aa, Artificial
  CDR sequence
GWGDSAY

SEQ ID NO: 1635 - protein, 15 aa, Artificial
  CDR sequence
NGIESYGWGNRHFNY

SEQ ID NO: 1636 - protein, 10 aa, Artificial
  CDR sequence
GGWGTGRYNY

SEQ ID NO: 1637 - protein, 12 aa, Artificial
  CDR sequence
GWGTAPLSTSVY

SEQ ID NO: 1638 - protein, 15 aa, Artificial
  CDR sequence
DRFNTIANLPGEYDY

SEQ ID NO: 1639 - protein, 15 aa, Artificial
  CDR sequence
ETFNSISNLPGEYDY

SEQ ID NO: 1640 - protein, 15 aa, Artificial
  CDR sequence
DHFTFMSNLPSEYDY

SEQ ID NO: 1641 - protein, 15 aa, Artificial
  CDR sequence
RKIYRSLSYYGDYDS

SEQ ID NO: 1642 - protein, 14 aa, Artificial
  CDR sequence
RLTMATPNQSQYYY

SEQ ID NO: 1643 - protein, 7 aa, Artificial
  CDR sequence
SGIGTDN

SEQ ID NO: 1644 - protein, 7 aa, Artificial
  CDR sequence
SGIGTDN

SEQ ID NO: 1645 - protein, 14 aa, Artificial
  CDR sequence
DILYKTDIYYRNDF

SEQ ID NO: 1646 - protein, 22 aa, Artificial
  CDR sequence
LPYTICPVVVKKGAVYYGVDDY

SEQ ID NO: 1647 - protein, 11 aa, Artificial
  CDR sequence
GFSDRSFAVTH

SEQ ID NO: 1648 - protein, 15 aa, Artificial
  CDR sequence
DFRLARLRVADDYDY

SEQ ID NO: 1649 - protein, 20 aa, Artificial
  CDR sequence
LRTDYSINWANCQRDSLYGY

SEQ ID NO: 1650 - protein, 11 aa, Artificial
  CDR sequence
GGWTRTHPFDY

SEQ ID NO: 1651 - protein, 11 aa, Artificial
  Framework sequence
RGHGTQVTVSS

SEQ ID NO: 1652 - protein, 11 aa, Artificial
  Framework sequence
MGHGTQVTVSS

SEQ ID NO: 1653 - protein, 11 aa, Artificial
  Framework sequence
GGHGTQVTVSS

SEQ ID NO: 1654 - protein, 11 aa, Artificial
  Framework sequence
GGHGTQVTVSS

SEQ ID NO: 1655 - protein, 11 aa, Artificial
  Framework sequence
GGHGTQVTVSS

SEQ ID NO: 1656 - protein, 11 aa, Artificial
  Framework sequence
RGHGTQVTVSS

SEQ ID NO: 1657 - protein, 11 aa, Artificial
  Framework sequence
TGHGTQVTVSS

SEQ ID NO: 1658 - protein, 11 aa, Artificial
  Framework sequence
TGHGTQVTVSS

SEQ ID NO: 1659 - protein, 11 aa, Artificial
  Framework sequence
GGHGTQVTVSS

SEQ ID NO: 1660 - protein, 11 aa, Artificial
  Framework sequence
GSHGTQVTVSS

SEQ ID NO: 1661 - protein, 11 aa, Artificial
  Framework sequence
RGHGTQVTVSS

SEQ ID NO: 1662 - protein, 11 aa, Artificial
  Framework sequence
RGHGTQVTVSS

SEQ ID NO: 1663 - protein, 11 aa, Artificial
  Framework sequence
RGHGTQVTVSS

SEQ ID NO: 1664 - protein, 11 aa, Artificial
  Framework sequence
GSHGTQVTVSS

SEQ ID NO: 1665 - protein, 11 aa, Artificial
  Framework sequence
GSHGTQVTVSS

SEQ ID NO: 1666 - protein, 11 aa, Artificial
  Framework sequence
GSHGTQVTVSS

SEQ ID NO: 1667 - protein, 11 aa, Artificial
  Framework sequence
RGHGTQVTVSS

SEQ ID NO: 1668 - protein, 11 aa, Artificial
  Framework sequence
RGHGTQVTVSS

SEQ ID NO: 1669 - protein, 11 aa, Artificial
  Framework sequence
RGHGTQVTVSS

SEQ ID NO: 1670 - protein, 11 aa, Artificial
  Framework sequence
RGHGTQVTVSS

SEQ ID NO: 1671 - protein, 11 aa, Artificial
  Framework sequence
RGHGTQVTVSS

SEQ ID NO: 1672 - protein, 11 aa, Artificial
  Framework sequence
RGHGTQVTVSS

SEQ ID NO: 1673 - protein, 11 aa, Artificial
  Framework sequence
RGHGTQVTVSS

SEQ ID NO: 1674 - protein, 11 aa, Artificial
  Framework sequence
GTHGTQVTVSS

SEQ ID NO: 1675 - protein, 11 aa, Artificial
  Framework sequence
GTHGTQVTVSS

SEQ ID NO: 1676 - protein, 11 aa, Artificial
  Framework sequence
RGHGTQVTVSS

SEQ ID NO: 1677 - protein, 11 aa, Artificial
  Framework sequence
RGHGTPVTVSS

SEQ ID NO: 1678 - protein, 11 aa, Artificial
  Framework sequence
RGHGTQVTVSS

SEQ ID NO: 1679 - protein, 11 aa, Artificial
  Framework sequence
GGHGTQVTVSS

SEQ ID NO: 1680 - protein, 11 aa, Artificial
  Framework sequence
RGHGTQVTVSS

SEQ ID NO: 1681 - protein, 11 aa, Artificial
  Framework sequence
MGHGTQVTVSS

SEQ ID NO: 1682 - protein, 11 aa, Artificial
  Framework sequence
WGQGTQVTVSS

SEQ ID NO: 1683 - protein, 11 aa, Artificial
  Framework sequence
WGQGTQVTVSS

SEQ ID NO: 1684 - protein, 11 aa, Artificial
  Framework sequence
WGQGTQVTVSS

SEQ ID NO: 1685 - protein, 11 aa, Artificial
  Framework sequence
WGQGTQVTVSS

SEQ ID NO: 1686 - protein, 11 aa, Artificial
  Framework sequence
AGQGTQVTVSS

SEQ ID NO: 1687 - protein, 11 aa, Artificial
  Framework sequence
AGQGTQVTVSS

SEQ ID NO: 1688 - protein, 11 aa, Artificial
  Framework sequence
AGQGTQVTVSS

SEQ ID NO: 1689 - protein, 11 aa, Artificial
  Framework sequence
AGQGTQVTVSS

SEQ ID NO: 1690 - protein, 11 aa, Artificial
  Framework sequence
AGQGTQVTVSS

SEQ ID NO: 1691 - protein, 11 aa, Artificial
  Framework sequence
AGQGTQVTVSS

SEQ ID NO: 1692 - protein, 11 aa, Artificial
  Framework sequence
AGQGTQVTVSS

SEQ ID NO: 1693 - protein, 11 aa, Artificial
  Framework sequence
AGPGTQVTVSS

SEQ ID NO: 1694 - protein, 11 aa, Artificial
  Framework sequence
AGQGTQVTVSS

SEQ ID NO: 1695 - protein, 11 aa, Artificial
  Framework sequence
AGQGTQVTVSS

SEQ ID NO: 1696 - protein, 11 aa, Artificial
  Framework sequence
AGQGTQVTVSS

SEQ ID NO: 1697 - protein, 11 aa, Artificial
  Framework sequence
AGPGTQVTVSS

SEQ ID NO: 1698 - protein, 11 aa, Artificial
  Framework sequence
AGQGTQVTVSS

SEQ ID NO: 1699 - protein, 11 aa, Artificial
  Framework sequence
AGQGTQVTVSS

SEQ ID NO: 1700 - protein, 11 aa, Artificial
  Framework sequence
AGQGTQVTVSS

SEQ ID NO: 1701 - protein, 11 aa, Artificial
  Framework sequence
AGQGTQVTVSS

SEQ ID NO: 1702 - protein, 11 aa, Artificial
  Framework sequence
AGPGTQVTVSS

SEQ ID NO: 1703 - protein, 11 aa, Artificial
  Framework sequence
AGQGTQVTVSS

SEQ ID NO: 1704 - protein, 11 aa, Artificial
  Framework sequence
AGQGTQVTVSS

SEQ ID NO: 1705 - protein, 11 aa, Artificial
  Framework sequence
AGQGTQVTVSS

SEQ ID NO: 1706 - protein, 11 aa, Artificial
  Framework sequence
AGQGTQVTVSS

SEQ ID NO: 1707 - protein, 11 aa, Artificial
  Framework sequence
AGQGTQVTVSS

SEQ ID NO: 1708 - protein, 11 aa, Artificial
  Framework sequence
AGQGTQVTVSS

SEQ ID NO: 1709 - protein, 11 aa, Artificial
  Framework sequence
AGQGTQVTVSS

SEQ ID NO: 1710 - protein, 11 aa, Artificial
  Framework sequence
AGPGTQVTVSS

SEQ ID NO: 1711 - protein, 11 aa, Artificial
  Framework sequence
AGQGTQVTVSS

SEQ ID NO: 1712 - protein, 11 aa, Artificial
  Framework sequence
WGQGTQVTVSS

SEQ ID NO: 1713 - protein, 11 aa, Artificial
  Framework sequence
WGQGTQVTVSS

SEQ ID NO: 1714 - protein, 11 aa, Artificial
  Framework sequence
WGQGTQVTVSS

SEQ ID NO: 1715 - protein, 11 aa, Artificial
  Framework sequence
WGQGTQVTVSS

SEQ ID NO: 1716 - protein, 11 aa, Artificial
  Framework sequence
WGQGTQVTVSS

SEQ ID NO: 1717 - protein, 11 aa, Artificial
  Framework sequence
WGQGTQVTVSS

SEQ ID NO: 1718 - protein, 11 aa, Artificial
  Framework sequence
WGQGTQVTVSS

SEQ ID NO: 1719 - protein, 11 aa, Artificial
  Framework sequence
WGQGTQVTVSS

SEQ ID NO: 1720 - protein, 11 aa, Artificial
  Framework sequence
WGQGTQVTVSS

SEQ ID NO: 1721 - protein, 11 aa, Artificial
  Framework sequence
WGQGTQVTVSS

SEQ ID NO: 1722 - protein, 11 aa, Artificial
  Framework sequence
WGQGTQVTVSS

SEQ ID NO: 1723 - protein, 11 aa, Artificial
  Framework sequence
WGQGTQVTVSS

SEQ ID NO: 1724 - protein, 11 aa, Artificial
  Framework sequence
WGHGTQVTVSS

SEQ ID NO: 1725 - protein, 11 aa, Artificial
  Framework sequence
WGHGTQVTVSS

SEQ ID NO: 1726 - protein, 11 aa, Artificial
  Framework sequence
WGHGTQVTVSS

SEQ ID NO: 1727 - protein, 11 aa, Artificial
  Framework sequence
WGQGTQVTVSS

SEQ ID NO: 1728 - protein, 11 aa, Artificial
  Framework sequence
WGQGTQVTVSS

SEQ ID NO: 1729 - protein, 11 aa, Artificial
  Framework sequence
WGQGTQVTVSS

SEQ ID NO: 1730 - protein, 11 aa, Artificial
  Framework sequence
WGQGTQVTVSS

SEQ ID NO: 1731 - protein, 11 aa, Artificial
  Framework sequence
WGQGTQVTVSS

SEQ ID NO: 1732 - protein, 11 aa, Artificial
  Framework sequence
WGQGTQVTVSS

SEQ ID NO: 1733 - protein, 11 aa, Artificial
  Framework sequence
WGQGTQVTVSS

SEQ ID NO: 1734 - protein, 11 aa, Artificial
  Framework sequence
WGQGTPVTVSS

SEQ ID NO: 1735 - protein, 11 aa, Artificial
  Framework sequence
WGQGTQVTVSS

SEQ ID NO: 1736 - protein, 11 aa, Artificial
  Framework sequence
WGQGTQVTVSS

SEQ ID NO: 1737 - protein, 11 aa, Artificial
  Framework sequence
WGQGTQVTVSS

SEQ ID NO: 1738 - protein, 11 aa, Artificial
  Framework sequence
WGQGTPVTVSS

SEQ ID NO: 1739 - protein, 11 aa, Artificial
  Framework sequence
WGQGTQVTVSS

SEQ ID NO: 1740 - protein, 11 aa, Artificial
  Framework sequence
WGQGTQVTVSS

SEQ ID NO: 1741 - protein, 11 aa, Artificial
  Framework sequence
WGQGTQVTVSS

SEQ ID NO: 1742 - protein, 11 aa, Artificial
  Framework sequence
WGQGTQVTVSS

SEQ ID NO: 1743 - protein, 11 aa, Artificial
  Framework sequence
WGQGTQVTVSS

SEQ ID NO: 1744 - protein, 11 aa, Artificial
  Framework sequence
WGQGTQVTVSS

SEQ ID NO: 1745 - protein, 11 aa, Artificial
  Framework sequence
WGQGTQVTVSS

SEQ ID NO: 1746 - protein, 11 aa, Artificial
  Framework sequence
WGQGTQVTVSS

SEQ ID NO: 1747 - protein, 11 aa, Artificial
  Framework sequence
WGQGTQVTVSS

SEQ ID NO: 1748 - protein, 11 aa, Artificial
  Framework sequence
WGQGTQVTVSS

SEQ ID NO: 1749 - protein, 11 aa, Artificial
  Framework sequence
WGQGTQVTVSS

SEQ ID NO: 1750 - protein, 11 aa, Artificial
  Framework sequence
WGQGTQVTVSS

SEQ ID NO: 1751 - protein, 11 aa, Artificial
  Framework sequence
WGQGTQVTVSS

SEQ ID NO: 1752 - protein, 11 aa, Artificial
  Framework sequence
WGQGTQVTVSS

SEQ ID NO: 1753 - protein, 11 aa, Artificial
  Framework sequence
WGQGTQVTVSS

SEQ ID NO: 1754 - protein, 11 aa, Artificial
  Framework sequence
WGQGTQVTVSS

SEQ ID NO: 1755 - protein, 11 aa, Artificial
  Framework sequence
WGQGTQVTVSS

SEQ ID NO: 1756 - protein, 11 aa, Artificial
  Framework sequence
WGQGTQVTVSS

SEQ ID NO: 1757 - protein, 11 aa, Artificial
  Framework sequence
WGQGTQVTVSS

SEQ ID NO: 1758 - protein, 11 aa, Artificial
  Framework sequence
WGQGTQVTVSS

SEQ ID NO: 1759 - protein, 11 aa, Artificial
  Framework sequence
WGQGTQVTVSS

SEQ ID NO: 1760 - protein, 11 aa, Artificial
  Framework sequence
WGQGTQVTVSS

SEQ ID NO: 1761 - protein, 11 aa, Artificial
  Framework sequence
WGQGTQVTVSS

SEQ ID NO: 1762 - protein, 11 aa, Artificial
  Framework sequence
WGQGTQVTVSS

SEQ ID NO: 1763 - protein, 11 aa, Artificial
  Framework sequence
WGQGTQVTVSS

SEQ ID NO: 1764 - protein, 11 aa, Artificial
  Framework sequence
WGQGTQVTVSS

SEQ ID NO: 1765 - protein, 11 aa, Artificial
  Framework sequence
WGQGTQVTVSS

SEQ ID NO: 1766 - protein, 11 aa, Artificial
  Framework sequence
WGQGTQVTVSS

SEQ ID NO: 1767 - protein, 11 aa, Artificial
  Framework sequence
WGQGTQVTVSS

SEQ ID NO: 1768 - protein, 11 aa, Artificial
  Framework sequence
WGQGTQVTVSS

SEQ ID NO: 1769 - protein, 11 aa, Artificial
  Framework sequence
WGQGTQVTVSS

SEQ ID NO: 1770 - protein, 11 aa, Artificial
  Framework sequence
WGQGTQVTVSS

SEQ ID NO: 1771 - protein, 11 aa, Artificial
  Framework sequence
WGQGTQVTVSS

SEQ ID NO: 1772 - protein, 11 aa, Artificial
  Framework sequence
WGQGTQVTVSS

SEQ ID NO: 1773 - protein, 11 aa, Artificial
  Framework sequence
WGQGTQVTVSS

SEQ ID NO: 1774 - protein, 11 aa, Artificial
  Framework sequence
WGQGTQVTVSS

SEQ ID NO: 1775 - protein, 11 aa, Artificial
  Framework sequence
WGQGSQVTVSS

SEQ ID NO: 1776 - protein, 11 aa, Artificial
  Framework sequence
WGRGSQVTVSS

SEQ ID NO: 1777 - protein, 11 aa, Artificial
  Framework sequence
WGQGTQVTVSS

SEQ ID NO: 1778 - protein, 11 aa, Artificial
  Framework sequence
WGQGTQVTVSS

SEQ ID NO: 1779 - protein, 11 aa, Artificial
  Framework sequence
WGQGTQVTVSS

SEQ ID NO: 1780 - protein, 11 aa, Artificial
  Framework sequence
WGQGTQVTVSS

SEQ ID NO: 1781 - protein, 11 aa, Artificial
  Framework sequence
WGQGTQVTVSS

SEQ ID NO: 1782 - protein, 11 aa, Artificial
  Framework sequence
WGQGTQVTVSS

SEQ ID NO: 1783 - protein, 11 aa, Artificial
  Framework sequence
WGQGTQVTVSS

SEQ ID NO: 1784 - protein, 11 aa, Artificial
  Framework sequence
WGQGTQVTVSS

SEQ ID NO: 1785 - protein, 11 aa, Artificial
  Framework sequence
WGQGTQVTVSS

SEQ ID NO: 1786 - protein, 11 aa, Artificial
  Framework sequence
WGQGTQVTVSS

SEQ ID NO: 1787 - protein, 11 aa, Artificial
  Framework sequence
WGKGTLVTVSS

SEQ ID NO: 1788 - protein, 11 aa, Artificial
  Framework sequence
WGQGTQVTVSS

SEQ ID NO: 1789 - protein, 11 aa, Artificial
  Framework sequence
WGQGTQVTVSS

SEQ ID NO: 1790 - protein, 11 aa, Artificial
  Framework sequence
WGQGTQVTVSS

SEQ ID NO: 1791 - protein, 11 aa, Artificial
  Framework sequence
WGQGTQVTVSS

SEQ ID NO: 1792 - protein, 11 aa, Artificial
  Framework sequence
WGQGTQVTVSS

SEQ ID NO: 1793 - protein, 11 aa, Artificial
  Framework sequence
WGQGTQVTVSS

SEQ ID NO: 1794 - protein, 11 aa, Artificial
  Framework sequence
WGQGTQVTVSS

SEQ ID NO: 1795 - protein, 11 aa, Artificial
  Framework sequence
WGQGTQVTVSS

SEQ ID NO: 1796 - protein, 11 aa, Artificial
  Framework sequence
WGQGTQVTVSS

SEQ ID NO: 1797 - protein, 11 aa, Artificial
  Framework sequence
WGQGTQVTVSS

SEQ ID NO: 1798 - protein, 11 aa, Artificial
  Framework sequence
WGQGTQVTVSS

SEQ ID NO: 1799 - protein, 11 aa, Artificial
  Framework sequence
WGQGTQVTVSS

SEQ ID NO: 1800 - protein, 11 aa, Artificial
  Framework sequence
ATLGTQVTVSS

SEQ ID NO: 1801 - protein, 11 aa, Artificial
  Framework sequence
WGQGSQVTVSS

SEQ ID NO: 1802 - protein, 11 aa, Artificial
  Framework sequence
WGQGSQVTVSS

SEQ ID NO: 1803 - protein, 11 aa, Artificial
  Framework sequence
WGQGSQVTVSS

SEQ ID NO: 1804 - protein, 11 aa, Artificial
  Framework sequence
WGQGSQVTVSS

SEQ ID NO: 1805 - protein, 11 aa, Artificial
  Framework sequence
WGQGTQVTVSS

SEQ ID NO: 1806 - protein, 11 aa, Artificial
  Framework sequence
WGQGTQVTVSS

SEQ ID NO: 1807 - protein, 11 aa, Artificial
  Framework sequence
WGQGTQVTVSS

SEQ ID NO: 1808 - protein, 11 aa, Artificial
  Framework sequence
WGQGTQVTVSS

SEQ ID NO: 1809 - protein, 11 aa, Artificial
  Framework sequence
WGQGTQVTVSS

SEQ ID NO: 1810 - protein, 11 aa, Artificial
  Framework sequence
WGQGTQVTVSS

SEQ ID NO: 1811 - protein, 11 aa, Artificial
  Framework sequence
WGQGTQVTVSS

SEQ ID NO: 1812 - protein, 11 aa, Artificial
  Framework sequence
WGQGTQVTVSS

SEQ ID NO: 1813 - protein, 11 aa, Artificial
  Framework sequence
WGQGTQVTVSS

SEQ ID NO: 1814 - protein, 11 aa, Artificial
  Framework sequence
WGQGTQVTVSS

SEQ ID NO: 1815 - protein, 11 aa, Artificial
  Framework sequence
WGQGTQVTVSS

SEQ ID NO: 1816 - protein, 11 aa, Artificial
  Framework sequence
WGQGTQVTVSS

SEQ ID NO: 1817 - protein, 11 aa, Artificial
  Framework sequence
WGQGTQVTVSS

SEQ ID NO: 1818 - protein, 11 aa, Artificial
  Framework sequence
WGQGTQVTVSS

SEQ ID NO: 1819 - protein, 11 aa, Artificial
  Framework sequence
WGQGTQVTVSS

SEQ ID NO: 1820 - protein, 11 aa, Artificial
  Framework sequence
WGQGTQVTVSS

SEQ ID NO: 1821 - protein, 11 aa, Artificial
  Framework sequence
WGQGTQVTVSS

SEQ ID NO: 1822 - protein, 11 aa, Artificial
  Framework sequence
WGQGTQVTVSS

SEQ ID NO: 1823 - protein, 11 aa, Artificial
  Framework sequence
WGQGTQVTVSS

SEQ ID NO: 1824 - protein, 11 aa, Artificial
  Framework sequence
WGQGTQVTVSS

SEQ ID NO: 1825 - protein, 11 aa, Artificial
  Framework sequence
WGQGTQVTVSS

SEQ ID NO: 1826 - protein, 11 aa, Artificial
  Framework sequence
WGQGTQVTVSS

SEQ ID NO: 1827 - protein, 11 aa, Artificial
  Framework sequence
WGQGTQVTVSS

SEQ ID NO: 1828 - protein, 11 aa, Artificial
  Framework sequence
WGQGTQVTVSS

SEQ ID NO: 1829 - protein, 11 aa, Artificial
  Framework sequence
WGQGTQVTVSS

SEQ ID NO: 1830 - protein, 11 aa, Artificial
  Framework sequence
WGQGTQVTVSS

SEQ ID NO: 1831 - protein, 11 aa, Artificial
  Framework sequence
WGQGTQVTVSS

SEQ ID NO: 1832 - protein, 11 aa, Artificial
  Framework sequence
WGQGTQVTVSS

SEQ ID NO: 1833 - protein, 11 aa, Artificial
  Framework sequence
WGQGTQVTVSS

SEQ ID NO: 1834 - protein, 11 aa, Artificial
  Framework sequence
WGQGTQVTVSS

SEQ ID NO: 1835 - protein, 11 aa, Artificial
  Framework sequence
WGQGTQVTVSS

SEQ ID NO: 1836 - protein, 11 aa, Artificial
  Framework sequence
WGQGTQVTVSS

SEQ ID NO: 1837 - protein, 11 aa, Artificial
  Framework sequence
WGQGTQVTVSS

SEQ ID NO: 1838 - protein, 11 aa, Artificial
  Framework sequence
WGQGTQVTVSS

SEQ ID NO: 1839 - protein, 11 aa, Artificial
  Framework sequence
WGQGTQVTVSS

SEQ ID NO: 1840 - protein, 11 aa, Artificial
  Framework sequence
WGQGTQVTVSS

SEQ ID NO: 1841 - protein, 11 aa, Artificial
  Framework sequence
WGQGTQVTVSS

SEQ ID NO: 1842 - protein, 11 aa, Artificial
  Framework sequence
WGQGTQVTVSS

SEQ ID NO: 1843 - protein, 11 aa, Artificial
  Framework sequence
WGQGTQVTVSS

SEQ ID NO: 1844 - protein, 11 aa, Artificial
  Framework sequence
WGQGTQVTVSS

SEQ ID NO: 1845 - protein, 11 aa, Artificial
  Framework sequence
WGQGTQVTVSS

SEQ ID NO: 1846 - protein, 11 aa, Artificial
  Framework sequence
WGQGTQVTVSS

SEQ ID NO: 1847 - protein, 11 aa, Artificial
  Framework sequence
WGQGTQVTVSS

SEQ ID NO: 1848 - protein, 11 aa, Artificial
  Framework sequence
WGQGTQVTVSS

SEQ ID NO: 1849 - protein, 11 aa, Artificial
  Framework sequence
WGQGTQVTVSS

SEQ ID NO: 1850 - protein, 11 aa, Artificial
  Framework sequence
WGQGTQVTVSS

SEQ ID NO: 1851 - protein, 11 aa, Artificial
  Framework sequence
WGQGTQVTVSS

SEQ ID NO: 1852 - protein, 11 aa, Artificial
  Framework sequence
WGQGTQVTVSS

SEQ ID NO: 1853 - protein, 11 aa, Artificial
  Framework sequence
WGQGTQVTVSS

SEQ ID NO: 1854 - protein, 11 aa, Artificial
  Framework sequence
RGQGTQVTVSS

SEQ ID NO: 1855 - protein, 11 aa, Artificial
  Framework sequence
RGQGTQVTVSS

SEQ ID NO: 1856 - protein, 11 aa, Artificial
  Framework sequence
WGRGTQVTVSS

SEQ ID NO: 1857 - protein, 11 aa, Artificial
  Framework sequence
RGQGTQVTVSS

SEQ ID NO: 1858 - protein, 11 aa, Artificial
  Framework sequence
WGQGTQVTVSS

SEQ ID NO: 1859 - protein, 11 aa, Artificial
  Framework sequence
WGQGTQVTVSS

SEQ ID NO: 1860 - protein, 11 aa, Artificial
  Framework sequence
WGQGTQVTVSS

SEQ ID NO: 1861 - protein, 11 aa, Artificial
  Framework sequence
WGQGTQVTVSS

SEQ ID NO: 1862 - protein, 11 aa, Artificial
  Framework sequence
WGQGTQVTVSS

SEQ ID NO: 1863 - protein, 11 aa, Artificial
  Framework sequence
WGQGTQVTVSS

SEQ ID NO: 1864 - protein, 11 aa, Artificial
  Framework sequence
WGQGTQVTVSS

SEQ ID NO: 1865 - protein, 11 aa, Artificial
  Framework sequence
WGQGTQVTVSS

SEQ ID NO: 1866 - protein, 11 aa, Artificial
  Framework sequence
WGQGTQVTVSS

SEQ ID NO: 1867 - protein, 11 aa, Artificial
  Framework sequence
WGQGTQVTVSS

SEQ ID NO: 1868 - protein, 11 aa, Artificial
  Framework sequence
WGQGNQVTVSS

SEQ ID NO: 1869 - protein, 11 aa, Artificial
  Framework sequence
WGQGTQVTVSS

SEQ ID NO: 1870 - protein, 11 aa, Artificial
  Framework sequence
WGQGTQVTVSS

SEQ ID NO: 1871 - protein, 11 aa, Artificial
  Framework sequence
WGQGTQVTVSS

SEQ ID NO: 1872 - protein, 11 aa, Artificial
  Framework sequence
WGQGTQVTVSS

SEQ ID NO: 1873 - protein, 11 aa, Artificial
  Framework sequence
WGQGTQVTVSS

SEQ ID NO: 1874 - protein, 11 aa, Artificial
  Framework sequence
WGPGTQVTVSS

SEQ ID NO: 1875 - protein, 11 aa, Artificial
  Framework sequence
FGQGTQVTVSS

SEQ ID NO: 1876 - protein, 11 aa, Artificial
  Framework sequence
FGQGTQVTVSS

SEQ ID NO: 1877 - protein, 11 aa, Artificial
  Framework sequence
WGQGTQVTVSS

SEQ ID NO: 1878 - protein, 11 aa, Artificial
  Framework sequence
WGQGTQVTVSS

SEQ ID NO: 1879 - protein, 11 aa, Artificial
  Framework sequence
WGQGTQVTVSS

SEQ ID NO: 1880 - protein, 11 aa, Artificial
  Framework sequence
WGQGTQVTVSS

SEQ ID NO: 1881 - protein, 11 aa, Artificial
  Framework sequence
WGQGTQVTVSS

SEQ ID NO: 1882 - protein, 11 aa, Artificial
  Framework sequence
WGQGTQVTVSS

SEQ ID NO: 1883 - protein, 11 aa, Artificial
  Framework sequence
WGQGTQVTVSS

SEQ ID NO: 1884 - protein, 11 aa, Artificial
  Framework sequence
WGQGTQVTVSS

SEQ ID NO: 1885 - protein, 11 aa, Artificial
  Framework sequence
WGQGTQVTVSS

SEQ ID NO: 1886 - protein, 11 aa, Artificial
  Framework sequence
WGQGTQVTVSS

SEQ ID NO: 1887 - protein, 11 aa, Artificial
  Framework sequence
WGQGTQVTVSS

SEQ ID NO: 1888 - protein, 11 aa, Artificial
  Framework sequence
WGKGTQVTVSS

SEQ ID NO: 1889 - protein, 11 aa, Artificial
  Framework sequence
WGQGTQVTVSS

SEQ ID NO: 1890 - protein, 11 aa, Artificial
  Framework sequence
WGQGTQVTVSS

SEQ ID NO: 1891 - protein, 11 aa, Artificial
  Framework sequence
WGQGTQVTVSS

SEQ ID NO: 1892 - protein, 11 aa, Artificial
  Framework sequence
WGQGTQVTVSS

SEQ ID NO: 1893 - protein, 11 aa, Artificial
  Framework sequence
WGQGTQVTVSS

SEQ ID NO: 1894 - protein, 11 aa, Artificial
  Framework sequence
WGQGTQVTVSS

SEQ ID NO: 1895 - protein, 11 aa, Artificial
  Framework sequence
WGQGTQVTVSS

SEQ ID NO: 1896 - protein, 11 aa, Artificial
  Framework sequence
WGQGTQVTVSS

SEQ ID NO: 1897 - protein, 11 aa, Artificial
  Framework sequence
WGQGTQVTVSS

SEQ ID NO: 1898 - protein, 11 aa, Artificial
  Framework sequence
WGQGTQVTVSS

SEQ ID NO: 1899 - protein, 11 aa, Artificial
  Framework sequence
WGQGTQVTVSS

SEQ ID NO: 1900 - protein, 11 aa, Artificial
  Framework sequence
WGQGTQVTVSS

SEQ ID NO: 1901 - protein, 11 aa, Artificial
  Framework sequence
WGQGTQVTVSS

SEQ ID NO: 1902 - protein, 11 aa, Artificial
  Framework sequence
WGQGTQVTVSS

SEQ ID NO: 1903 - protein, 11 aa, Artificial
  Framework sequence
WGQGTQVTVSS

SEQ ID NO: 1904 - protein, 11 aa, Artificial
  Framework sequence
WGQGTQVTVSS

SEQ ID NO: 1905 - protein, 11 aa, Artificial
  Framework sequence
WGQGTQVTVSS

SEQ ID NO: 1906 - protein, 11 aa, Artificial
  Framework sequence
WGQGTQVTVSS

SEQ ID NO: 1907 - protein, 11 aa, Artificial
  Framework sequence
WGQGTQVTVSS

SEQ ID NO: 1908 - protein, 11 aa, Artificial
  Framework sequence
WGQGTQVTVSS

SEQ ID NO: 1909 - protein, 11 aa, Artificial
  Framework sequence
WGQGTQVTVSS

SEQ ID NO: 1910 - protein, 11 aa, Artificial
  Framework sequence
WTVGTQVTVSS

SEQ ID NO: 1911 - protein, 11 aa, Artificial
  Framework sequence
WGQGTQVTVSS

SEQ ID NO: 1912 - protein, 11 aa, Artificial
  Framework sequence
WGQGTQVTVSS

SEQ ID NO: 1913 - protein, 11 aa, Artificial
  Framework sequence
WGQGTQVTVSS

SEQ ID NO: 1914 - protein, 11 aa, Artificial
  Framework sequence
WGQGTQVTVSS

SEQ ID NO: 1915 - protein, 11 aa, Artificial
  Framework sequence
WGQGTQVTVSS

SEQ ID NO: 1916 - protein, 11 aa, Artificial
  Framework sequence
WGQGTQVTVSS

SEQ ID NO: 1917 - protein, 11 aa, Artificial
  Framework sequence
WGQGTQVTVSS

SEQ ID NO: 1918 - protein, 11 aa, Artificial
  Framework sequence
WGQGIEVTVSS

SEQ ID NO: 1919 - protein, 11 aa, Artificial
  Framework sequence
WGQGIEVTVSS

SEQ ID NO: 1920 - protein, 11 aa, Artificial
  Framework sequence
WGQGTQVTVSS

SEQ ID NO: 1921 - protein, 11 aa, Artificial
  Framework sequence
WGKGTQVTVSS

SEQ ID NO: 1922 - protein, 11 aa, Artificial
  Framework sequence
KGQGTQVTVSS

SEQ ID NO: 1923 - protein, 11 aa, Artificial
  Framework sequence
WGQGTQVTVSS

SEQ ID NO: 1924 - protein, 11 aa, Artificial
  Framework sequence
WGQGTQVTVSS

SEQ ID NO: 1925 - protein, 11 aa, Artificial
  Framework sequence
WGQGTQVTVSS

SEQ ID NO: 1926 - protein, 118 aa, Artificial
  single domain antibody or Nanobody sequence
EVQLVESGGGLVHPGGSLRLSCVGSGFSLDDYGMTWVRRAPGKGLEWVSSINWSGTHTDYADSVKGRFTISRDNAKNTLFLQMNSLNPEDTAVYYCGQGWKIVPTNPRGHGTQVTVSS

SEQ ID NO: 1927 - protein, 118 aa, Artificial
  single domain antibody or Nanobody sequence
EVQLVESGGGLVQPGGSLRLSCVGSGFSLDDYAMTWVRQAPGKGLEWVSSINWSGTHTDYADSVKGRFTISRDNAKNTLFLQMNSLSPEDTAVYYCNQGWKIRPTIPMGHGTQVTVSS

SEQ ID NO: 1928 - protein, 118 aa, Artificial
  single domain antibody or Nanobody sequence
EVQLVESGGGLVQPGGSLRLSCVASGFSLDDYGMTWVRQAPGKGLEWVSSINWSGTHTDYTDPVKGRFTISRDNAKNTLFLQMNNLTPEDTAVYYCNRGWKIVPTDLGGHGTQVTVSS

SEQ ID NO: 1929 - protein, 118 aa, Artificial
  single domain antibody or Nanobody sequence
EVQLVESGGGLVQPGGSLRLSCVASGFSLDDYGMTWVRQAPGKGLEWVSSINWSGTHTDYADSVKGRFTISRDNAKNTLFLQMNNLRSEDTAVYSCNQGWKIVPTDRGGHGTQVTVSS

SEQ ID NO: 1930 - protein, 118 aa, Artificial
  single domain antibody or Nanobody sequence
EVQLVESGGGLVQPGGSLRLSCVASGFSLDDYGMTWVRQAPGKGLEWVSSINWSGTHTDYADSVKGRFTISRDNAKNTLFLQMNSLRSEDTAVYYCNQGWKIVPTDRGGHGTQVTVSS

SEQ ID NO: 1931 - protein, 118 aa, Artificial
  single domain antibody or Nanobody sequence
EVQLVESGGGLVQPGGSLRLSCVASGFSLDDYGMTWVRQAPGKGLEWVSSINWSGTHTDYADSVKGRFTISRDNAKNTLFLQMNSLRSEDTAVYYCNQGWKIVPTDRRGHGTQVTVSS

SEQ ID NO: 1932 - protein, 118 aa, Artificial
  single domain antibody or Nanobody sequence
EVQLVESGGGLVQPGGSLRLSCVASGFSLDDYGMTWVRQAPGKGLEWVSSINWSGTHTDYADSVKGRFTISRDNAKNTLFLQMNSLRSEDTAVYYCNQGWKIVPTDRTGHGTQVTVSS

SEQ ID NO: 1933 - protein, 117 aa, Artificial
  single domain antibody or Nanobody sequence
EVQLVESGGGLVQAGGSLRLSCVASKMTFMRYTMGWYRQAPGKQRDLVASIDSSGGTNYADSVKGRFTISRDNAKNTVYLEMNSLTPEDTAVYYCNQGWKIVPTDRTGHGTQVTVSS

SEQ ID NO: 1934 - protein, 118 aa, Artificial
  single domain antibody or Nanobody sequence
EVQLMESGGGLVQPGGSLRLSCVASGFSLDDYGMTWVRQAPGKGLEWVSSINWSGTHTDYADSVKGRFTISRDNAKNTLFLQMNSLRSEDTAVYYCNQGWKIVPTDRGGHGTQVTVSS

SEQ ID NO: 1935 - protein, 118 aa, Artificial
  single domain antibody or Nanobody sequence
EVQLVESGGGLVQPGGSLRLSCVASGFSLDDYGMTWVRQAPGKGLEWVSSINWSGTHTDYADSVKGRFTISRDNAKNTLFLQMNSLRSEDTAVYYCNQGWKIVPTDRGSHGTQVTVSS

SEQ ID NO: 1936 - protein, 118 aa, Artificial
  single domain antibody or Nanobody sequence
EVQLVESGGGLVQPGGSLRLSCVASGFSLDDYGMTWVRQAPGKELEWISSINWSGTHTDYADSVKGRFTISRDNAKNTLFLQMNSLTPEDTAVYYCNQGWKIVPMDRRGHGTQVTVSS

SEQ ID NO: 1937 - protein, 118 aa, Artificial
  single domain antibody or Nanobody sequence
EVQLVESGGGLVQPGGSLRLSCVASGFSLDDYGMTWVRQAPGKGLEWVSSINWSGTHTDYADSVKGRFTISRDNAKNTLFLQMNSLTPEDTAVYYCNQGWKIIPTDRRGHGTQVTVSS

SEQ ID NO: 1938 - protein, 118 aa, Artificial
  single domain antibody or Nanobody sequence
EVQLVESGGGLVQPGGSLRLSCVASGFSLDDYAMTWVRQAPGKGLEWVSSINWSGTHTDYADSVKGRFTISRDNARNTLFLQMNSLTPEDTAIYYCNQGWKILPTDRRGHGTQVTVSS

SEQ ID NO: 1939 - protein, 118 aa, Artificial
  single domain antibody or Nanobody sequence
EVQLVESGGGLVQPGGSLRLSCVASGFSLDDYGMTWVRQAPGKGLEWVSSINWSGTHTDYADSVKGRFTISRDNAKNTLFLQMNSLSPEDTAVYYCNQGWKILPTNRGSHGTQVTVSS

SEQ ID NO: 1940 - protein, 118 aa, Artificial
  single domain antibody or Nanobody sequence
EVQLVESGGGLVQPGGSLRLSCVASGFSLDDYGMTWVRQAPGKGFEWVSSINWSGTHTDYADSVKGRFTISRDNAKNTLFLQMNSLSPEDTAVYYCNQGWKILPTNRGSHGTQVTVSS

SEQ ID NO: 1941 - protein, 118 aa, Artificial
  single domain antibody or Nanobody sequence
EVQLVESGGGLVQPGGSLRLSCVASGFSLDDYGMTWVRQAPGKGLEWVSSINWSGTHTDYADSVKGRFTISRDNAKNTLFLQMNSLSPEDTAVYYCNRGWKILPTNRGSHGTQVTVSS

SEQ ID NO: 1942 - protein, 118 aa, Artificial; identical to SEQ ID NO: 1937
  single domain antibody or Nanobody sequence

SEQ ID NO: 1943 - protein, 118 aa, Artificial
  single domain antibody or Nanobody sequence
EVQLVESGGGLVQPGGSLRLSCVASGFSLDDYGMTWVRQAPGKGLEWVSSINWSGTHTDYADSVRGRFVISRDNAKNTLFLQMNSLSPEDTAVYYCNQGWKIIPTDRRGHGTQVTVSS

SEQ ID NO: 1944 - protein, 118 aa, Artificial
  single domain antibody or Nanobody sequence
EVQLVESGGGLVQPGGSLRLSCVASGFSLDDYGMTWVRQAPGKGLEWVSSINWSGTHTDYTDSVKGRFTISRDNAKNTLFLQMNSLTPEDTAVYYCNQGWKIIPTDRRGHGTQVTVSS

SEQ ID NO: 1945 - protein, 118 aa, Artificial
  single domain antibody or Nanobody sequence
EVQLVESGGGLVQPGGSLKLSCVASGFSLDDYGMTWVRQAPGKGLEWVSSINWNVTHTDYAYSVKGRFTISRDNAKNTLFLQMNSLTPEDTAVYYCNQGWKIIPTDRRGHGTQVTVSS

SEQ ID NO: 1946 - protein, 118 aa, Artificial
  single domain antibody or Nanobody sequence
EVQLVESGGGLVQPGGSLRLSCVASGFSLDDYGMTWVRQAPGKGLEWVSSINWSGTHTDCADSVKGRFTISRDNAKNTLFLQMNSLTPEDTAVYYCNQGWKIIPTDRRGHGTQVTVSS

SEQ ID NO: 1947 - protein, 118 aa, Artificial
  single domain antibody or Nanobody sequence
EVQLVESGGGLVQPGGSLRLSCVASGFSLDDYGMTWVRQAPGKGLEWVSSINWSGTHTDYADSVKGRFTISRDNAKNTLFLQMNNLTPEDTAVYYCNQGWKIIPTDRRGHGTQVTVSS

SEQ ID NO: 1948 - protein, 118 aa, Artificial
  single domain antibody or Nanobody sequence
EVQLVESGGGLVQPGGSLRLSCVASGFSLDDYGMTWVRQAPGKGLEWVSSINWSGTHTDYADSVKGRFVISRDNAKNTLFLQMNSLSPEDTAVYYCNQGWKIIPTDRRGHGTQVTVSS

SEQ ID NO: 1949 - protein, 118 aa, Artificial
  single domain antibody or Nanobody sequence
EVQLVESGGGLVQPGGSLRLSCVASGFSLDDYAMTWVRQAPGKGLEWVSSINWSGTHTDYADSVKGRFTISRDNAKNTLFLQMNSLSPEDTAVYYCNKGWKVWPTDRGTHGTQVTVSS

SEQ ID NO: 1950 - protein, 118 aa, Artificial
  single domain antibody or Nanobody sequence
EVQLVESGGGLVQPGGSLRLSCVASGFSLDDYAMTWVRQAPGKGLEWVSSINWSGTHTDYADSVKGRFTISRDNAKNTLFLQMNSLNPEDTAVYYCNQGWKVWPTDRGTHGTQVTVSS

SEQ ID NO: 1951 - protein, 118 aa, Artificial
  single domain antibody or Nanobody sequence
EVQLVESGGGLVQPGGSLRLSCVASGFSLDDYGMTWVRQAPGKGLEWVSSINWSGTHTDYADSVKGRFTISRDNAKNTLFLQMNSLTPEDTAVYYCNQGWKILPAERRGHGTQVTVSS

SEQ ID NO: 1952 - protein, 118 aa, Artificial
  single domain antibody or Nanobody sequence
EVQLVESGGGLVQPGGSLRLSCVASGFSLDDYGMTWVRQAPGKGLEWVSSINWSGTHTDYADSVKGRFTISRDNAKNTLFLQMNSLTPEDTAVYYCNQGWKILPAERRGHGTPVTVSS

SEQ ID NO: 1953 - protein, 118 aa, Artificial
  single domain antibody or Nanobody sequence
EVQLVESGGGLVQPGGSLKLSCVASGFSLDDYGMTWVRQAPGKGLEWVSSINWNGTHTDYAYSVKGRFTISRDNAKNTLFLQMNSLTPENTAVYYCNQGWKILPAERRGHGTQVTVSS

SEQ ID NO: 1954 - protein, 118 aa, Artificial
  single domain antibody or Nanobody sequence
EVQLVESGGGLVQPGGSLRLSCVASGFSLINYAMTWVRQAPGKGLEWVSSINWSGTHTDYADSVKGRFTISRDNAKNTLFLHMNNLSPEDTAVYYCGQGWKIHPADRGGHGTQVTVSS

SEQ ID NO: 1955 - protein, 118 aa, Artificial; identical to SEQ ID NO: 1951
  single domain antibody or Nanobody sequence

SEQ ID NO: 1956 - protein, 118 aa, Artificial; identical to SEQ ID NO: 1927
  single domain antibody or Nanobody sequence

SEQ ID NO: 1957 - protein, 120 aa, Artificial
  single domain antibody or Nanobody sequence
EVQLVESGGGLVQPGGSLRLSCAASGFIFDDYAMSWVRQAPGKGLEWVSAINWSGSHRNYADSVKGRFTISRDNAKKTVYLQMNSLQSEDTAVYYCGTGWQSTTKNQGYWGQGTQVTVSS

SEQ ID NO: 1958 - protein, 120 aa, Artificial
  single domain antibody or Nanobody sequence
EVQLVESGGGLVQPGGSLRLSCAASGFIFDDYAMSWVRQAPGKGLEWVSAINWSGTHRNYADSVKGRFTISRDNNKKTVYLQMNSLKSEDTAVYYCATGWQSTTKNQGYWGQGTQVTVSS

SEQ ID NO: 1959 - protein, 120 aa, Artificial
  single domain antibody or Nanobody sequence
EVQLVESGGGLVQPGGSLKLSCAASGFIFDDYAMSWVRQAPGKGLEWVSAINWSGSHRNYADSVKGRFTISRDNAKKTVYLQMNSLQSEDTAVYYCGTGWQSTTKSQGYWGQGTQVTVSS

SEQ ID NO: 1960 - protein, 120 aa, Artificial
  single domain antibody or Nanobody sequence
EVQLVESGGGLVQPGGSLTLSCAGSGFIFDDYAMSWVRQAPGKGLEWVSSINWSGSHRNYADSVKGRFTISRDNAKKTLYLQMNSLKSEDTAVYYCATGWQSTTKNQNYWGQGTQVTVSS

SEQ ID NO: 1961 - protein, 124 aa, Artificial
  single domain antibody or Nanobody sequence
EVQLVESGGSLVQPGGSLRLSCAASGFTFDDYAMSWVRQAPGKGLEWISSINWSGTHKDYADSVKGRFTISRNNANNTLYLQMNNLKFEDTAVYYCAKNWRDAGTTWFEKSGSAGQGTQVTVSS

SEQ ID NO: 1962 - protein, 124 aa, Artificial
  single domain antibody or Nanobody sequence
EVQLVESGGSLVQPGESLRLSCAASGFTFDDYAMSWVRQAPGKGLEWISSINWSGTHTDYADSVKGRFTISRNNANNTLYLQMNNLKFEDTAVYYCAKNWRDAGTTWFEKSGSAGQGTQVTVSS

SEQ ID NO: 1963 - protein, 124 aa, Artificial
  single domain antibody or Nanobody sequence
EVQLVESGGSLVPPGGSLRLSCAASGFTFDDYAMSWVRQAPGKGLEWVSSINWSGTHTDYTDSVKGRFTISRNNANNTLYLQMNSLKSEDTAVYYCAKNWRDAGTTWFEKSGSAGQGTQVTVSS

SEQ ID NO: 1964 - protein, 124 aa, Artificial
  single domain antibody or Nanobody sequence
EVQLVESGGSLVQPGGSLRLSCAASGFTFDDYAMSWVRQAPGKGLEWISSINWSGTHTDYADSVKGRFTISRNNANNTLYLQMNNLKFEDTAVYYCAKNWRDAGTTWFEKSGSAGQGTQVTVSS

SEQ ID NO: 1965 - protein, 124 aa, Artificial
  single domain antibody or Nanobody sequence
EVQLVESGGSLVQPGGSLRLSCAASGFTFDDYAMSWVRQVPGKGLEWVSSINWSGTHTDYADSVKGRFTISRNNANNTLYLQMNSLKSEDTAVYYCAKNWRDAGTTWFEKSGSAGQGTQVTVSS

SEQ ID NO: 1966 - protein, 124 aa, Artificial
  single domain antibody or Nanobody sequence
EVQLVESGGSLVPPGGSLRLSCAVSGFTFDDYAMSWVRQAPGKGLEWVSSINWSGTHTDYTDSVKGRFTISRNNANNMLYLQMNSLKSEDTAVYYCAKNWRDAGTTWFEKSGSAGQGTQVTVSS

SEQ ID NO: 1967 - protein, 124 aa, Artificial
  single domain antibody or Nanobody sequence
EVQLVESGGSLVQPGGSLRLSCAASGFTFDDYALSWVRQAPGKGLEWISSINWSGTHTDYADSVKGRFTISRNNANNTLYLQMNNLKFEDTAVYYCAKNWRDAGTTWFEKSGSAGQGTQVTVSS

SEQ ID NO: 1968 - protein, 124 aa, Artificial
  single domain antibody or Nanobody sequence
EVQLVESGGSLVQPGGSLRLSCAASGFTFDDYAMTWVRQAPGKGLEWVSSINWSGTHTDYADSVKGRFTISRNNANNTLYLQMNSLKSDDTAVYYCAKNWGDAGTTWFEKSGSAGPGTQVTVSS

SEQ ID NO: 1969 - protein, 124 aa, Artificial
  single domain antibody or Nanobody sequence
EVQLVESGGSLVQPGGSLRLSCAASGFTFDDYAMTWVRQASGKGLEWVSSINWSGTHTDYTDSVKGRFTISRNNANNTLYLQMNSLKSEDTAVYYCAKNWGDAGTTWFEKSGSAGQGTQVTVSS

SEQ ID NO: 1970 - protein, 124 aa, Artificial
  single domain antibody or Nanobody sequence
EVQLVESGGSLVPPGGSLRLSCAASGFTFDDYAMSWVRQAPGKGLEWVSSINWSGTHTGYTDSVKGRFTISRNNANNTLYLQMNSLKSEDTAVYYCAKNWGDAGTTWFEKSGSAGQGTQVTVSS

SEQ ID NO: 1971 - protein, 124 aa, Artificial
  single domain antibody or Nanobody sequence
EVQLVESGGSLVQPGGSLRLSCAASGFTFDDYAMTWVRQAPGKGLEWVSSINWSGTHTDYTDSVKGRFTISRNNANNTLYLQMNSLKSEDTAVYYCAKNWGDAGTTWFEKSGSAGQGTQVTVSS

SEQ ID NO: 1972 - protein, 124 aa, Artificial
  single domain antibody or Nanobody sequence
EVQLVESGGSLVQPGGSLRLSCAASGFTFDDYAMTWVRQAPGKGLEWVSSINWSGTHTDYTGSVKGRFTISRNNANNTLYLQMNSLKSDDTAVYYCAKNWGDAGTTWFEKSGSAGPGTQVTVSS

SEQ ID NO: 1973 - protein, 124 aa, Artificial
  single domain antibody or Nanobody sequence
EVQLVESGGSLVPPGGSLRLSCAASGFTFDDYAMSWVRQAPGKGLEWVSSINWSGTHTDYTDSVKGRFTISRNNANNTLYLQMNSLKSEDTAVYYCAKNWGDAGTTWFEKSGSAGQGTQVTVSS

SEQ ID NO: 1974 - protein, 124 aa, Artificial
  single domain antibody or Nanobody sequence
KVQLVESGGSLVPPGGSLRLSCAASGFTFDDYAMTWVRQAPGKGLEWVSSINWSGTHTDYTDSVKGRFTISRNNANNTLYLQMNSLKSEDTAVYYCAKNWGDAGTTWFEKSGSAGQGTQVTVSS

SEQ ID NO: 1975 - protein, 124 aa, Artificial; identical to SEQ ID NO: 1970
  single domain antibody or Nanobody sequence

SEQ ID NO: 1976 - protein, 124 aa, Artificial
  single domain antibody or Nanobody sequence
EVQLVESGGSLVPPGGSLRLSCAASGFTFDDYGMSWVRQAPGKGLEWVSSINWSGTHTDYTDSVKGRFTISRNNANNTLYLQMNSLKSEDTAVYYCAKNWGDAGTTWFEKSGSAGQGTQVTVSS

SEQ ID NO: 1977 - protein, 124 aa, Artificial
  single domain antibody or Nanobody sequence
EVQLVESGGSLVQPGGSLRLSCAASGFTFDDYAMTWVRQAPGKGLEWVSSINWSGTHTDYTDSVKGRFTISRNNANNTLYLQMNSLKSDDTAVYYCAKNWGDAGTTWFEKSGSAGPGTQVTVSS

SEQ ID NO: 1978 - protein, 124 aa, Artificial
  single domain antibody or Nanobody sequence
EVQLVESGGGLVQPGGSLRLSCATSGFTFDDYAMTWVRQAPGKGLEWVSSINWSGTHTDYTDSVKGRFTISRNNANNTLYLQMNSLKSEDTAVYYCAKNWGDAGTTWFEKSGSAGQGTQVTVSS

SEQ ID NO: 1979 - protein, 124 aa, Artificial
  single domain antibody or Nanobody sequence
EVQLVESGGSLVQPGGSLRLSCATSGFTFDDYAMTWVRQAPGKGLEWVSSINWSGTHTDYTDSVKGRFTISRNNANNTLYLQMNSLKSEDTAVYYCAKNWGDAGTTWFEKSGSAGQGTQVTVSS

SEQ ID NO: 1980 - protein, 124 aa, Artificial
  single domain antibody or Nanobody sequence
EVQLVESGGSLVQPGGSLRLSCAASGFTFDDYAMTWVRQAPGKGLEWVSSINWSGTHTDCTDSVKGRFTISRNNANNTLYLQMNSLKSEDTAVYYCAKNWGDAGTTWFEKSGSAGQGTQVTVSS

SEQ ID NO: 1981 - protein, 124 aa, Artificial
  single domain antibody or Nanobody sequence
EVQLVESGGSLVQPGGSLRLSCAASGFTFDDYAMTWVRQASGKGLEWVSSINWSGTHTDYADSVKGRFTISRNNANNTLYLQMNSLKSEDTAVYYCAKNWGDAGTTWFEKSGSAGQGTQVTVSS

SEQ ID NO: 1982 - protein, 124 aa, Artificial
  single domain antibody or Nanobody sequence
EVQLVESGGSLVQPGGSLRLSCAASGFTFDDYAMTWVRQAPGKGLEWVSSINWSGTHTDYTGSVKGRFTISRNNANNTLYLQMNSLKSDDTAVYYCAKNWGDAGTTWFEKSGSAGQGTQVTVSS

SEQ ID NO: 1983 - protein, 124 aa, Artificial; identical to SEQ ID NO: 1971
  single domain antibody or Nanobody sequence

SEQ ID NO: 1984 - protein, 124 aa, Artificial; identical to SEQ ID NO: 1976
  single domain antibody or Nanobody sequence

SEQ ID NO: 1985 - protein, 124 aa, Artificial
  single domain antibody or Nanobody sequence
EVQLVESGGSLVQPGGSLRLSCAASGFTFDDYAMTWVRQTPGKGLEWVSSINWSGTHTDYTDSVKGRFTISRNNANNTLYLQMNSLKSDDTAVYYCAKNWGDAGTTWFEKSGSAGPGTQVTVSS

SEQ ID NO: 1986 - protein, 124 aa, Artificial; identical to SEQ ID NO: 1965
  single domain antibody or Nanobody sequence

SEQ ID NO: 1987 - protein, 118 aa, Artificial
  single domain antibody or Nanobody sequence
EVQLVESGGGLVQAGGSLRLSCAASGITFSINTMGWYRQAPGKQRELVALISSIGDTYYADSVKGRFTISRDNAKNTVYLQMNSLKPEDTAVYYCKRFRTAAQGTDYWGQGTQVTVSS

SEQ ID NO: 1988 - protein, 127 aa, Artificial
  single domain antibody or Nanobody sequence
EVQLVESGGGFVQTGGSPRLSCAASGRSFSEYAAAWFRQSPGKERDLVAGIMWDGRSLFYADSVKGRFTISRDNAKNTLHLQMNSLKPEDTAVYYCAYHKTPYTTLELNRPHAFGSWGQGTQVTVSS

SEQ ID NO: 1989 - protein, 119 aa, Artificial
  single domain antibody or Nanobody sequence
KVQLVESGGGLVQPGGSLRLSCAASGSIFGFNDMAWYRQAPGKQRELVALISRVGVTSSADSVKGRFTISRVNAKDTVYLQMNSLKPEDTAVYYCYMDQRLDGSTLAYWGQGTQVTVSS

SEQ ID NO: 1990 - protein, 123 aa, Artificial
  single domain antibody or Nanobody sequence
EVQLVESGGGLVQAGGSLRLSCAASGSTFSSYGMGWFRQVPGKEREFVATINWSGVTAYADSVKGRFTISRDNAKKTVYLQMNSLKPEDTARYYCGVETYGSGSSLMTEYDYWGQGTQVTVSS

SEQ ID NO: 1991 - protein, 123 aa, Artificial
  single domain antibody or Nanobody sequence
EVQLVESGGGLVQAGGSLRLSCAVNSRTFSSYGMGWFRQAPGKEREFVATINWSGVTAYADSIKGRFTISRDNAKETVYLQMNSLKPDDTGVYYCAAETYGSGSSLMSEYDYWGQGTQVTVSS

SEQ ID NO: 1992 - protein, 123 aa, Artificial
  single domain antibody or Nanobody sequence
EVQLVESGGGLVQAGGSLRLSCAVSSRAFSSYGMGWFRQAPGKDREFVATINWSGVTAYADSIKGRFTISRDNAKETVYLQMNSLKPEDTGVYYCAAETYGSGSSLMSEYDYWGQGTQVTVSS

SEQ ID NO: 1993 - protein, 123 aa, Artificial
  single domain antibody or Nanobody sequence
EVQLVESGGGLVQAGGSLRLSCAVNSRTFSSYGMGWFRQAPGKEREFVATINWSGATAYADSIKGRFTISRDNAKETVYLQMNSLKPDDTGVYYCAAETYGSGSSLMSEYDYWGQGTQVTVSS

SEQ ID NO: 1994 - protein, 123 aa, Artificial
  single domain antibody or Nanobody sequence
EVQLVESGGGLVQAGGSLRLSCAVSSRAFSSYGMGWFRQAPGKDREFVATINWSGVTAYADSIKGRFTISRDNAKETVYLQMNSLKPDDTGVYYCAAETFGSGSSLMSEYDYWGQGTQVTVSS

SEQ ID NO: 1995 - protein, 123 aa, Artificial
  single domain antibody or Nanobody sequence
EVQLVESGGGSVQAGGSLRLSCVASEGTFSSYGMGWFRQAPGKERAFVATINWSGVTAYADSVKGRFTISRDNAKKTVYLQMNSLKPEDTAVYYCATDTYGSGSSLMNEYDYWGQGTQVTVSS

SEQ ID NO: 1996 - protein, 123 aa, Artificial
  single domain antibody or Nanobody sequence
EVQLVESGGGSVQAGSSLTLSCVASEGTFSSYGMGWFRQAPGKERAFVATINWSGVNAYADSVKGRFTISRDNAKKTAYLQMNSLKPEDTAVYYCAAETYGSGSSLMNEYDYWGQGTQVTVSS

SEQ ID NO: 1997 - protein, 123 aa, Artificial
  single domain antibody or Nanobody sequence
EVQLVESGGGLVQPGGSLTLSCVASEGTFSSYGMGWFRQAPGKERAFVATINWSGVNAYADSVKGRFTISRDNAKKTAYLQMNSLKPEDTAVYYCAAETYGSGSSLMNEYDYWGQGTQVTVSS

SEQ ID NO: 1998 - protein, 123 aa, Artificial
  single domain antibody or Nanobody sequence
EVQLVESGGGSVQAGGSLRLSCAASGSTFSSYGMGWFRQAPGKERAFVATINWSGVTAYADSVKGRFTISRDNAKKTVYLQMNSLKPEDTAVYYCATETYGSGSSLMNEYDYWGQGTQVTVSS

SEQ ID NO: 1999 - protein, 123 aa, Artificial
  single domain antibody or Nanobody sequence
EVQLVKSGGGLVQAGGSLRLSCAASERTFSSYGMGWFRQAPGKEREFVATINWSGVTAYADSVKGRFTISRDNAKKTVYLQMNSLKPEDTAVYYCAAEPYGSGSSLISEYDYWGHGTQVTVSS

SEQ ID NO: 2000 - protein, 123 aa, Artificial
  single domain antibody or Nanobody sequence
EVQLVESGGGLVQAGGSLRLSCAASERTFSSYGMGWFRQAPGKEREFVATINWSGVTAYADSVKGRFTISRDNAKKTVYLQMNSLKPEDTAVYYCAAEPYGSGSSLISEYDYWGHGTQVTVSS

SEQ ID NO: 2001 - protein, 123 aa, Artificial
  single domain antibody or Nanobody sequence
EVQLVESGGGSVQAGGSLRLSCAASERTFSSYGMGWFRQAPGKEREFVATINWSGVTAYADSVKGRFTISRDNAKKTVYLQMNSLKPEDTAVYYCAAEPYGSGSSLMSEYDYWGHGTQVTVSS

SEQ ID NO: 2002 - protein, 120 aa, Artificial
  single domain antibody or Nanobody sequence
EVQLVESGGGLVQAGGSLRLSCAANGLTFRRYDMGWYRQAPGQQREWVAAISGAGDINYADSVKGRFTMARDNANHTVHLQMNSLKPEDTAVYYCNANWKMLLGVENDYWGQGTQVTVSS

SEQ ID NO: 2003 - protein, 123 aa, Artificial
  single domain antibody or Nanobody sequence
KVQLVESGGGLVQAGGSLRLSCAASGRTFTEYSMGWFRQAPGKEREFVATISWNYGYTYYSDSVKGRFTVSRDIAENTVYLQMNTLKSEDTAVYYCAAKIGWLSIRGDEYEYWGQGTQVTVSS

SEQ ID NO: 2004 - protein, 128 aa, Artificial
  single domain antibody or Nanobody sequence
EVQLVESGGGLVQAGGSLRLSCAASGFTFDDYGIGWFRQASGKEREGVSCITSSDGSTYYADSVKGRFTISSDNAKNTVYLQMNSLKPEDTAVYYCAALPFVCPSGSYSDYGDEYDYWGQGTQVTVSS

SEQ ID NO: 2005 - protein, 121 aa, Artificial
  single domain antibody or Nanobody sequence
EVQLVESGGGLVQPGGSLRLSCAASGFAFSSYAMSWVRQAPGKGLEWVSAVDSGGGRTDYAHSVKGRFTISRDNAKNTLYLQMSSLKPEDTALYYCTKHVSDSDYTEYDYWGQGTQVTVSS

SEQ ID NO: 2006 - protein, 125 aa, Artificial
  single domain antibody or Nanobody sequence
EVQLVESGGGLVQAGGSLRLSCTASGRTSSTSAMGWFRQAPGKEREFVATISRGGSATYYADSLKGRFTISRDNAKNTLYLQMNSLKPEDTAVYYCAARRSSLYTSSNVFEYDYWGQGTQVTVSS

SEQ ID NO: 2007 - protein, 113 aa, Artificial
  single domain antibody or Nanobody sequence
EVQLVESGGGLVQAGGSLRLSCVTSRRPASTRTMAWYRQAPGKQRDWVATISSHGLPVYADSVKGRFTVSRDNANNTVYLQMNTLKPEDTAVYYCRDVNADYWGQGTQVTVSS

SEQ ID NO: 2008 - protein, 113 aa, Artificial
  single domain antibody or Nanobody sequence
EVQLVESGGGLVQPGGSLRLSCAASRIPFSTRTMAWYRQAPGKQRDWVATIGTSGPPRYADSVKGRFTVSRDNAKNTVYLQMNSLKAEDTAVYYCWDVNADYWGQGTQVTVSS

SEQ ID NO: 2009 - protein, 113 aa, Artificial
  single domain antibody or Nanobody sequence
EVQLVESGGGLVQAGGSLRLSCVTSRRPASTRTMAWYRQAPGKQRDWVATISSHGLPVYADSVKGRFTVSRDNANNTVYLQMNTLKPEDTAVYYCRDVNADYWGQGTPVTVSS

SEQ ID NO: 2010 - protein, 113 aa, Artificial
  single domain antibody or Nanobody sequence
EVQLVESGGGLVQAGGSLRLSCVASRIPFSSRTMAWYRQAPGKQRDWVATISARGMPAYEDSVKGRFTVSRDNDKNTLYLQMNSLKPEDTAVYYCRDVNADYWGQGTQVTVSS

SEQ ID NO: 2011 - protein, 113 aa, Artificial
  single domain antibody or Nanobody sequence
EVQLVESGGGLVQAGGSLRLSCVTSRRPASTRTMAWYRQAQGKQRDWVATISSHGLPVYADSVKGRFTVSRDNANNTVYLQMNTLKPEDTAVYYCRDVNADYWGQGTQVTVSS

SEQ ID NO: 2012 - protein, 112 aa, Artificial
  single domain antibody or Nanobody sequence
EVQLVESGGGLVQAGGSLNLSCVASGIPFSTRTMAWYRQAPGKPRDWVATIRNGAPVYADSVKGRFTVSRDNAKNTLYLQMNSLKPEDTATYLCRDVNGDIWGQGTQVTVSS

SEQ ID NO: 2013 - protein, 112 aa, Artificial
  single domain antibody or Nanobody sequence
EVQLVESGGGLVQAGGSLNLSCVASGIPFSTRTMAWYRQPPGNERDWVATIRSGAPVYADSVKGRFTVSRDNAKNTLYLQMNSLEPEDTATYYCWDVNGDIWGQGTPVTVSS

SEQ ID NO: 2014 - protein, 112 aa, Artificial
  single domain antibody or Nanobody sequence
EVQLVESGGGLVQAGGSLNLSCVASGIPFSTRTMAWYRQTPGKSRDWVATIRSGTPVYADSVKGRFTVSRDNAKNTLYLRMNSLKSEDSATYTCRAVNADIWGQGTQVTVSS

SEQ ID NO: 2015 - protein, 113 aa, Artificial
  single domain antibody or Nanobody sequence
EVQLVESGGGLVQPGGSLRLSCVASRIPASIRTMAWYRQTPGNQRDWLATIGSSGTPAYADSVKGRFTVSRDNAKNTVYLQMNSLKPEDTAVYYCRDVNGDYWGQGTQVTVSS

SEQ ID NO: 2016 - protein, 113 aa, Artificial
  single domain antibody or Nanobody sequence
EVQLVESGGGLVQAGGSLRLSCVASRIPASIRTMAWYRQAPGKQRDWVATIGTGGTPAYADSFKGRFTVSRDNANHTVYLQMNSLKPEDTAVYYCRDVNGDYWGQGTQVTVSS

SEQ ID NO: 2017 - protein, 113 aa, Artificial; identical to SEQ ID NO: 2015
  single domain antibody or Nanobody sequence

SEQ ID NO: 2018 - protein, 113 aa, Artificial
  single domain antibody or Nanobody sequence
EVQLVESGGGLVQPGGSLKLSCVASTIPASIRTMAWYRQTPGNQRDWLATIGSSGTPAYADSVKGRFTVSRDNAKNTVYLQMNSLKPEDTAVYYCRDVNGDYWGQGTQVTVSS

SEQ ID NO: 2019 - protein, 113 aa, Artificial
  single domain antibody or Nanobody sequence
EVQLVESGGGLVQAGGSLRLSCVASGIPFRSRTMAWYRQAPGKTRDWVATIGTHGTPLYADSVKGRFTVSRDNAKNTLYLQMNSLKPEDTAVYYCWDVNGDYWGQGTQVTVSS

SEQ ID NO: 2020 - protein, 120 aa, Artificial
  single domain antibody or Nanobody sequence
EVQLVESGGGLVQAGESLRLSCATSGITFKRYVMGWYRQGPGKQRELVATVNDGGTTSYADSVKGRFAISRDNAKNTAYLQMNSLKAEDTAVYYCNAVWKLPRFVDNDYWGQGTQVTVSS

SEQ ID NO: 2021 - protein, 120 aa, Artificial
  single domain antibody or Nanobody sequence
EVQLMESGGGLVQAGGSLRLSCAANGLTFRRYDMGWYRQAPGQQREWVAAISGAGDINYADSVKGRFTMARDNANHTVHLQMNSLKPEDTAVYYCNANWKMLLGVENDYWGQGTQVTVSS

SEQ ID NO: 2022 - protein, 120 aa, Artificial; identical to SEQ ID NO: 2002
  single domain antibody or Nanobody sequence

SEQ ID NO: 2023 - protein, 115 aa, Artificial
  single domain antibody or Nanobody sequence
EVQLVESGGGLVQPGGSLRLSCAASGLGIAFSRRTMAWYRQAPGKQRDWVATIAGDGSTVYADSMKGRFTISRDNAENTVYLQMNSLKPEDTAVYYCWDVNRDYWGQGTQVTVSS

SEQ ID NO: 2024 - protein, 115 aa, Artificial
  single domain antibody or Nanobody sequence
EVQLVESGGGLVQPGGSLRLSCAASGLGIAFSRRTMAWYRQAPGKQRDWVATIAGDGSTVYADSMKGRFTISRDNAKNTVYLQINSLKPEDTAVYYCWDVNRDYWGQGTQVTVSS

SEQ ID NO: 2025 - protein, 113 aa, Artificial
  single domain antibody or Nanobody sequence
EVQLVESGGGLVQAGGSLRLSCVASGIAQSIRVMAWYRQPPGKQRDWVGTISSDGTANYADSVKGRFTISRDNAKKTMYLQMNSLKPDDTAVYYCRDVNRDYWGQGTQVTVSS

SEQ ID NO: 2026 - protein, 113 aa, Artificial
  single domain antibody or Nanobody sequence
EVQLVESGGGLVQAGGSLRLSCAASGIAFRIRTMAWYRQAPGKQRDWVATSDSGGTTLYADSVKGRFTVSRDNAENTVYLQMNSLKPEDTAVYYCRDVNRDYWGQGTQVTVSS

SEQ ID NO: 2027 - protein, 112 aa, Artificial
  single domain antibody or Nanobody sequence
EVQLVESGGGLVQAGGSLRLSCVASGIPSIRAIAWYRQAPGKQRDWVATSGTGYGATYDDSVKGRFTLSRDNAKNTVYLQMNSLKPEDTAVYYCRDVNRDYWGQGTQVTVSS

SEQ ID NO: 2028 - protein, 115 aa, Artificial
  single domain antibody or Nanobody sequence
EVQLMESGGGLVQPGGSLRLSCAASGLGIAFSRRTMAWYRQAPGKQRDWVATIAGDGSTVYADSMKGRFTISRDNAENTVYLQMNSLKPEDTAVYYCWDVNRDYWGQGTQVTVSS

SEQ ID NO: 2029 - protein, 113 aa, Artificial
  single domain antibody or Nanobody sequence
EVQLVESGGGLVQAGGSLRLSCAASGIAFRIRTMAWYRQAPGKQRDWVATIGSDGTTIYADSVKGRFTLSRHNAENTVYLQMNSLKPEDTAVYYCRDVNRDYWGQGTQVTVSS

SEQ ID NO: 2030 - protein, 114 aa, Artificial
  single domain antibody or Nanobody sequence
EVQLVESGGGLVQAGGSLRLSCVVSGIPSSIRAMAWYRQAPGRQRDWVATIYSPSGSAVYADSVKGRFTISSDNAKSTIYLQMNSLKPDDTAVYYCRDVNRDYWGQGTQVTVSS

SEQ ID NO: 2031 - protein, 114 aa, Artificial
  single domain antibody or Nanobody sequence
EVQLVESGGGSVQAGGSLRLSCVVSGIPSSIRAMAWYRQAPGRQRDWVATIYSRSGGAVYADSVKGRFTISSDNAKNTIYLQMNSLKPDDTAVYYCRDVNRDYWGQGTQVTVSS

SEQ ID NO: 2032 - protein, 112 aa, Artificial
  single domain antibody or Nanobody sequence
EVQLVESGGGLVQAGGSLRLSCVASGIPSIHAMAWYRQAPGKQRDWGATTYSRGGTTYNDSAKGRFTISRDNAKKTVYLQMNSLKPEDTAVYYCRDVNRDYWGQGTQVTVSS

SEQ ID NO: 2033 - protein, 113 aa, Artificial
  single domain antibody or Nanobody sequence
EVQLVESGGGLVQPGGSLRLSCAASGIIGTIRTMAWYRQAPGKQRDWVASIGTRGAPVYADSVNGRFTISRDGATNTVFLQMNNLKPEDTAVYYCRDVNRDYWGQGTQVTVSS

SEQ ID NO: 2034 - protein, 113 aa, Artificial
  single domain antibody or Nanobody sequence
EVQLVESGGGLVQAGGSLRLPCAASGIAFRIRTMAWYRQAPGKQRDWVATSDSGGTTLYADSVKGRFTVSRDNAENTVYLQMNSLKPEDTAVYYCRDVNRDYWGQGTQVTVSS

SEQ ID NO: 2035 - protein, 113 aa, Artificial
  single domain antibody or Nanobody sequence
EVQLVESGGGLVQAGGSLRLSCAASGIAFRIRTMAWYRQAPGKQRDWVATSDSGGTTLYADSVKGRFTVSRDNADNTVYLQMNSLKPEDTAVYYCRDVNRDYWGQGTQVTVSS

SEQ ID NO: 2036 - protein, 114 aa, Artificial
  single domain antibody or Nanobody sequence
EVQLVESGGGLVQAGGSLRLSCVVSGIPSSIRAMAWYRQAPGRQRDWVATIYSPSGSAVYADSVKGRFTISSDNAKSTIYLQMNSLEPDDTAVYYCRDVNREYWGQGTQVTVSS

SEQ ID NO: 2037 - protein, 114 aa, Artificial
  single domain antibody or Nanobody sequence
EVQLVESGGGLVQAGGSLRLSCVVSGIPSTIRAMAWYRQAPGRQRDWVATIYSPSGSAVYADSVKGRFTISSDNAKKTIYLQMNSLKPDDTAVYYCRDVNREYWGQGTQVTVSS

SEQ ID NO: 2038 - protein, 114 aa, Artificial
  single domain antibody or Nanobody sequence
EVQLVESGGGLVQAGGSLRLSCVVSGIPSSIRAMAWYRQAPGRQRDWVATIYSPSGSAVYADSVKGRFTISSDNAKSTIYLQMNSLKPDDTAVYYCRDVNREYWGQGTQVTVSS

SEQ ID NO: 2039 - protein, 123 aa, Artificial
  single domain antibody or Nanobody sequence
EVQLVESGGGLVQAGGSLRLSCAASGRTFSDDAMGWFRQAPGKERECVASLYLNGDYPYYADSVKGRFTISRDNAKNAVILQMNNLKTEDTAVYYCAAKPGWVARDPSQYNYWGQGTQVTVSS

SEQ ID NO: 2040 - protein, 123 aa, Artificial
  single domain antibody or Nanobody sequence
EVQLVESGGGLVQAGGSLRLSCAASGRAFKDDAVGWFRQAPGKERECVASMYLDGDYPYYADSVKGRFTISRDNAKNAVILQMNNLKTEDTAVYYCAAKPGWVARDPSEYNYWGQGTQVTVSS

SEQ ID NO: 2041 - protein, 113 aa, Artificial
  single domain antibody or Nanobody sequence
EVQLVESGGGLVQTGGSLRLSCAASGSTFRTDMMGWYRQAPGKQREFVASITKFGSTNYADSVKGRFTISNDNAKDTVYLQMNSLKSEDTAVYYCRNFNRDLWGQGTQVTVSS

SEQ ID NO: 2042 - protein, 113 aa, Artificial
  single domain antibody or Nanobody sequence
EVQLVESGGGLVQAGGSLKLSCVNSGIPSTLRAMAWYRQAPGRQRDWVATSSNTGGTTYDDSVKGRFTISRDNAKNTVYLQMNSLKPEDTGVYYCRDVNRDLWGQGTQVTVSS

SEQ ID NO: 2043 - protein, 123 aa, Artificial
  single domain antibody or Nanobody sequence
EVQLVESGGGLVQPGGSLRLSCAASSVITLDSNAIGWFRQAPGKEREEVSCIASSDGSTYYAESVKGRFTISKDYTRNTVYLQVNSLKPEDTAVYHCATDANPNCGLNVWNSWGQGTQVTVSS

SEQ ID NO: 2044 - protein, 116 aa, Artificial
  single domain antibody or Nanobody sequence
EVQLVESGGGLVQAGGSLTLSCAASGSTSSLDIMAWYRQAPEKQRELVASVSGGGNSDYASSVKGRFTISGDTAKSTLYLQMNSLKPEDTAMYYCYGRDYYYMPFWGQGTQVTVSS

SEQ ID NO: 2045 - protein, 113 aa, Artificial
  single domain antibody or Nanobody sequence
EVQLVESGGGLAQAGGSLSLSCAASGRFFSTRVMAWYRQTPGKQREFVASMRGSGSTNYADSARGRFAISRDNAKNTVYLQMNSLKPEDTAVYYCRDINEDQWGQGTQVTVSS

SEQ ID NO: 2046 - protein, 113 aa, Artificial
  single domain antibody or Nanobody sequence
EVQLVESGGGLVQAGGSLSLSCAASGRFFSTRVMAWYRQTPGKQREFVASMRGSGSTNYADSVRGRFAISRDNAKNMVYLQMNTLKPEDTAVYYCRDINEDQWGQGTQVTVSS

SEQ ID NO: 2047 - protein, 113 aa, Artificial
  single domain antibody or Nanobody sequence
EVQLVESGGGLVQAGGSLSLSCAASGRFFSTRVMAWYRQTPGKQREFVASMRGSGSTNYADSARGRFAISRDNAKNTVYLQMNSLKPEDTAVYYCRDINEDQWGQGTQVTVSS

SEQ ID NO: 2048 - protein, 113 aa, Artificial
  single domain antibody or Nanobody sequence
EVQLVESGGGLVQAGGSLSLSCVASGRFFSTRVMAWYRQTPGKQREFVASMRGSGSTNYADSVRGRFAISRDNAKNTVYLQMNTLKPEDTAVYYCRDINEDQWGQGTQVTVSS

SEQ ID NO: 2049 - protein, 113 aa, Artificial
  single domain antibody or Nanobody sequence
EVQLVESGGGLVQAGGSLSLSCSASGRFFSTRVMAWYRQTPGNQREFVATIHSSGSTIYADSVRGRFAISRDNAKNTVYLQMRSLKPEDTAVYYCRDINADQWGQGTQVTVSS

SEQ ID NO: 2050 - protein, 113 aa, Artificial
  single domain antibody or Nanobody sequence
EVQLVESGGGLVQAGGSLTLSCTASETTVRIRTMAWYRQPPGNQREWVATIGSNGFATYPDSVKGRFTISRDNAKNTVYLQMNSLKPEDTAVYYCRDINRDIWGQGSQVTVSS

SEQ ID NO: 2051 - protein, 113 aa, Artificial
  single domain antibody or Nanobody sequence
EVQLVESGGGLVQAGGSLTLSCAPSESTVSFNTVAWYRQAPGEQREWVATISRQGMSTYPDSVKGRFTISRDNAKNTVYLQMNNLKPEDTAVYYCRDINHDIWGRGSQVTVSS

SEQ ID NO: 2052 - protein, 113 aa, Artificial
  single domain antibody or Nanobody sequence
EVQLVESGGGLVQAGGSLRLSCAASGIISSFRTMAWYRQAPGKQRDWVATIGSDGLANYADSVKGRFTISRDNAKKTVYLQMNSLKPEDTAVYFCRDINRDYWGQGTQVTVSS

SEQ ID NO: 2053 - protein, 113 aa, Artificial
  single domain antibody or Nanobody sequence
EVQLVESGGGLVQAGGSLRLSCVVSGVFGPIRAMAWYRQAPGKQRDWVATIGSSGHPVYTDSVKGRFTFSKDGAKNTVYLQMNSLKPEDTAVYYCRDINRDYWGQGTQVTVSS

SEQ ID NO: 2054 - protein, 115 aa, Artificial
  single domain antibody or Nanobody sequence
EVQLVESGGGLVQPGGSLRLSCAASGIGIAFSSRTMAWYRQAPGKQRDWVATIGSGGTTNYADSVKGRFTISRDNAKNTVYLQMNSLKPEDTAVYYCRDINRDYWGQGTQVTVSS

SEQ ID NO: 2055 - protein, 113 aa, Artificial
  single domain antibody or Nanobody sequence
EVQLVESGGGLVQPGGSLRLSCAASGIIGSFRTMAWYRQAPGNQRDWVATIGSAGLASYADSVRGRFTLSRDNAKKTVYLQMNSLKPEDTAIYYCRDINGDYWGQGTQVTVSS

SEQ ID NO: 2056 - protein, 115 aa, Artificial
  single domain antibody or Nanobody sequence
EVQLVESGGGLVQAGGSLRLSCAASGIISSFRTLAWYRQAPGKQRDWVATISSAGGTAYADAVKGRFTISISRDNVEYTVDLQMDSLKPEDTAVYYCRDINGDYWGQGTQVTVSS

SEQ ID NO: 2057 - protein, 115 aa, Artificial
  single domain antibody or Nanobody sequence
EVQLVESGGGLVQPGGSLRLSCAASGLGIAFSRRTMAWYRQAPGKQRDWVATIAGDGSTVYADSMKGRFTISRDNAKNTVYLQVNSLKPEDTAVYYCWDTNGDYWGQGTQVTVSS

SEQ ID NO: 2058 - protein, 120 aa, Artificial
  single domain antibody or Nanobody sequence
EVQLVESGGGLVQPGGSLRLSCAGSGFTFSNYAMTWVRQAPGKGLEWVSGVGGDGVGSYADSVKGRFTISRDNAKNTLYLQMNSLKPEDTALYYCTKDISTFGWGPFDYWGQGTQVTVSS

SEQ ID NO: 2059 - protein, 117 aa, Artificial
  single domain antibody or Nanobody sequence
EVQLVESGGGLVQAGGSLRLSCVASKMTFMRYTMGWYRQAPGKQRDLVASIDASGGTNYADSVKGRFTISRDNAKNTVYLEMNSLKPEDTGVYYCNGRWDIVGAIWWGQGTQVTVSS

SEQ ID NO: 2060 - protein, 117 aa, Artificial
  single domain antibody or Nanobody sequence
EVQLVESGGGLVQAGGSLRLSCVASKMTFMRYTMGWYRQAPGKQRDLVASIDSSGGTNYADSVKGRFTISRDNAKNTVYLEMNSLKPEDTGVYYCNGRWDIVGAIWWGQGTQVTVSS

SEQ ID NO: 2061 - protein, 117 aa, Artificial
  single domain antibody or Nanobody sequence
EVQLVESGGGLVQAGGSLRLSCVASKITFRRYIMDWYRQAPGKQRELVASINSDGSTGYTDSVKGRFTISRDNTKNTLDLQMNSLKPEDTAVYYCHGRWLEIGAEYWGQGTQVTVSS

SEQ ID NO: 2062 - protein, 117 aa, Artificial
  single domain antibody or Nanobody sequence
EVQLVESGGGLVQAGGSLKLSCVASGITFFRYTMGWYRQAPGKERELVAEISSADEPSFADAVKGRFTISRDNAKNTVVLQMNGLKPEDTAVYYCKGSWSYPGLTYWGKGTLVTVSS

SEQ ID NO: 2063 - protein, 117 aa, Artificial
  single domain antibody or Nanobody sequence
EVQLVESGGGLVQAGGSLRLSCAASGITFRRYDMGWYRQFPGKERELVATILSEGDTNYVDPVKGRFTISRDNAKNTVYLQMNDLKPEDTAVYYCNGVWRAIGRTYWGQGTQVTVSS

SEQ ID NO: 2064 - protein, 118 aa, Artificial
  single domain antibody or Nanobody sequence
EVQLVESGGGLVQAGGSLRLSCAASASIFGFDSMGWYRQAPGNERILVAIISNGGTTSYRDSVKGRFTIARDNAKNTVSLQMNSLKPEDTAVYYCNLDRRSYNGRQYWGQGTQVTVSS

SEQ ID NO: 2065 - protein, 122 aa, Artificial
  single domain antibody or Nanobody sequence
EVQLVESGGGLVQAGGSLRLSCAASGNIFSHNAMGWYRQAPGKQRELVTYITINGIANYVDSVKGRFTISRDNTKNTMYLQMVSLKPEDTAVYYCNVGGREYSGVYYYREYWGQGTQVTVSS

SEQ ID NO: 2066 - protein, 121 aa, Artificial
  single domain antibody or Nanobody sequence
EVQLVESGGGLVQAGDSLRLSCAASGRALDTYVMGWFRQAPGDGREFVAHIFRSGITSYASSVKGRFTISRDNAKNTVYLQMASLKPEDTAAYYCAARPSDTTWSESSASWGQGTQVTVSS

SEQ ID NO: 2067 - protein, 121 aa, Artificial
  single domain antibody or Nanobody sequence
EVQLVESGGGLVQPGGSLRLSCAASGFTFDDYSMSWVRQATGKGLEWVSGISWNGGSTNYADSVKGRFTISRDNVKNTLYLQMNSLKSEDTAVYYCAKDLGNSGRGPYTNWGQGTQVTVSS

SEQ ID NO: 2068 - protein, 122 aa, Artificial
  single domain antibody or Nanobody sequence
EVQLVESGGGLVQPGGSLKLSCAASGFTFSSYRMYWVRQAPGKGLEWVSAIKPDGSITYYADSVKGRFTISRDNAKNTVYLQMNSLKPEDTAVYYCATDCGVPGFGWTFSSWGQGTQVTVSS

SEQ ID NO: 2069 - protein, 117 aa, Artificial
  single domain antibody or Nanobody sequence
EVQLVESGGGLVQAGGSLRLSCAASGSTFSINRMAWYRQSPGKQRELVAAVDNDDNTEYSDSVAGRFTISRDNAKNAVHLQMNSLRLEDTAVYYCNAKQLPYLQNFWGQGTQVTVSS

SEQ ID NO: 2070 - protein, 117 aa, Artificial
  single domain antibody or Nanobody sequence
EVQLVESGGGLVQAGGSLRLSCAASGSTFSINRWGWYRQAPGKQRELVAAIDDGGNTEYSDFVNGRFTISRDNPETAVHLQMNSLKLEDTAVYYCNAKQLPYLQNFWGQGTQVTVSS

SEQ ID NO: 2071 - protein, 114 aa, Artificial
  single domain antibody or Nanobody sequence
EVQLVESGGGLVQAGGSLSLSCAASATLHRFDNNWYRQAPGKQRELVATIAHDGSTNYANSVKGRFTISRDNARDTLFLQMHALQPEDTAVYMCNLHRWGLNYWGQGTQVTVSS

SEQ ID NO: 2072 - protein, 122 aa, Artificial
  single domain antibody or Nanobody sequence
EVQLVESGGGLVQPGGSLRLSCAASGFTFSSYAMSWVRQAPGKGLEWVSAISSGGGSITTYADSVKGRFTISRDNAKNTLYLQMSSLKPEDTALYYCAKARSSSSYYDFGSWGQGTQVTVSS

SEQ ID NO: 2073 - protein, 122 aa, Artificial
  single domain antibody or Nanobody sequence
EVQLVESGGGLVQPGGSLRLSCAASGFTFSSYAMSWVRQAPGKGLEWVSAISSGGGSITTYADSVKGRFTISTDNAKNTLYLQMSSLKPEDTALYYCAKARSSSSYYDFGSWGQGTQVTVSS

SEQ ID NO: 2074 - protein, 122 aa, Artificial
  single domain antibody or Nanobody sequence
EVQLVESGGGLVQPGGSLRLSCAASGFTLDYCAIGWFRQAPGKEREGVSCISSSDGSTYYADSVKGRFTISRDNAKNTVYLQMNSLKPEDTAVYYCATDRGSGTCYADFGSWGQGTQVTVSS

SEQ ID NO: 2075 - protein, 120 aa, Artificial
  single domain antibody or Nanobody sequence
EVQLVESGGGLVQPGGSLRLSCAASGFIFDDYAMSWVRQAPGKGLEWVSSINWSGTHTDYAEDMKGRFTISRDNAKKTLYLQMNSLQSEDTAVYYCAKGWGPAVTSIPVATLGTQVTVSS

SEQ ID NO: 2076 - protein, 113 aa, Artificial; identical to SEQ ID NO: 2050
  single domain antibody or Nanobody sequence

SEQ ID NO: 2077 - protein, 113 aa, Artificial; identical to SEQ ID NO: 2050
  single domain antibody or Nanobody sequence

SEQ ID NO: 2078 - protein, 113 aa, Artificial; identical to SEQ ID NO: 2050
  single domain antibody or Nanobody sequence

SEQ ID NO: 2079 - protein, 113 aa, Artificial; identical to SEQ ID NO: 2050
  single domain antibody or Nanobody sequence

SEQ ID NO: 2080 - protein, 122 aa, Artificial
  single domain antibody or Nanobody sequence
EVQLVESGGGLVQPGGSLRLSCAASGRIFYPMGWFRQAPGKEREFVAAIGSGDIITYYADSVKGRFTISRDNAKNTVYLQMNSLKPEDTAVYYCASSRDYSRSRDPTSYDRWGQGTQVTVSS

SEQ ID NO: 2081 - protein, 122 aa, Artificial
  single domain antibody or Nanobody sequence
EVQLVESGGGLVQPGGSLRLSCAASGFTFDDYATSWVRQAPGKGPEWVSAINSGGGSTYYADSVKGRFTISRDNAKNTLYLQMNSLKPEDTAVYYCARPRGSSLYLLEYDYWGQGTQVTVSS

SEQ ID NO: 2082 - protein, 120 aa, Artificial
  single domain antibody or Nanobody sequence
EVQLVESGGGLVQAGGSLRLSCAASGRTFNAMGWFRQAPGKEREFVAAISRSPGVTYYADSVKGRFTTSRDNAKNTVYLQMNDLKPEDTAVYYCAADFYLATLAHEYDYWGQGTQVTVSS

SEQ ID NO: 2083 - protein, 122 aa, Artificial
  single domain antibody or Nanobody sequence
EVQLVESGGGLVQAGGSLRLSCAASGRTFSSYAMAWFRQAPGTEREFIAGIRWSDGSTYYADSVKGRFTISRDNAKNTVYLQMNSLKPEDTAVYYCAADFYVSTLAHEYDYWGQGTQVTVSS

SEQ ID NO: 2084 - protein, 122 aa, Artificial
  single domain antibody or Nanobody sequence
KVQLVESGGGLVQAGGSLRLSCAASGRTFSSYAMAWFRQAPGTEREFIAGIRWSDGSTYYADSVKGRFTISRANAKNTVYLQMNGLKPEDTAVYYCAADFYVSTLAHEYDYWGQGTQVTVSS

SEQ ID NO: 2085 - protein, 122 aa, Artificial
  single domain antibody or Nanobody sequence
EVQLVESGGGLVQAGGSLRLSCAASGRTFSSYAMAWFRQAPGKEREFVGGIRWSDGSTYYADSVKGRFTISRDNAKITVYLQMNSLKPEDTAVYYCAADFYVSTLAHEYDYWGQGTQVTVSS

SEQ ID NO: 2086 - protein, 123 aa, Artificial
  single domain antibody or Nanobody sequence
EVQLVESGGGLVQAGGSLRLSCAASGRTFSSYAMGWFRQAPGKERAFVAAIRWSGGNTYYADSVKGRFTISRDNAKNTVYLQMNSLKPEDTAVYYCAADTFTLSTLSHEYDYWGQGTQVTVSS

SEQ ID NO: 2087 - protein, 123 aa, Artificial
  single domain antibody or Nanobody sequence
EVQLVESGGGLVQAGGSLRLSCVASGRTFSNYALAWFRQAPGKEREFVAAINWRSGGSTYYADSVKGRFTISRDNAKNTVYLQMNSLKPEDTAVYYCAADLIVATLPGEYDYWGQGTQVTVSS

SEQ ID NO: 2088 - protein, 122 aa, Artificial
  single domain antibody or Nanobody sequence
EVQLVESGGGLVQAGGSLRLSCAASGRTFSRFAMGWFRQAPGKEREFVAAVRWSDDYTYYADSVKGRFTISRDNAKNTVYLQMNSLSPEDTAVYYCAADEILATLPHEYDYWGQGTQVTVSS

SEQ ID NO: 2089 - protein, 124 aa, Artificial
  single domain antibody or Nanobody sequence
EVQLVESGGGLVQAGGSLRLSCAASGRTFSSYAMAWFRQAPGKEREFVAGINKSGGITHSADSVKGRFTISRDNAKNTVYLQMNSLKPEDTAVYYCAADAYTVIATLPHEYDYWGQGTQVTVSS

SEQ ID NO: 2090 - protein, 123 aa, Artificial
  single domain antibody or Nanobody sequence
EVQLVESGGGLVQAGGSLRLSCEASGLTISSLTMAWFRQAPGKEREFVANIKWSGDRIVYADSVKGRFTISRDSAKNAVNLQMELVESDDTAVYYCAAKHSTVAGLTHEYDYWGQGTQVTVSS

SEQ ID NO: 2091 - protein, 120 aa, Artificial
  single domain antibody or Nanobody sequence
EVQLVESGGGLVQPGGSLRLSCAASGSAFSIKSMGWYRQAPGKQRELAAVIISSGTTTYADSVKGRFTISRDSAKNTVYLQMDSLKPEDTAVYVCNAVYVSTWGNGYDYWGQGTQVTVSS

SEQ ID NO: 2092 - protein, 126 aa, Artificial
  single domain antibody or Nanobody sequence
EVQLVESGGGLVQAGGSLGLSCAAAGRTFSSSLMGWFRQAPGKEREFVAAITDNGGSTYYADSVKGRFTISRDNAKNSVYLQMNSLKPEDTAIYYCAARRSGYYSLSTSPHQYAYWGQGTQVTVSS

SEQ ID NO: 2093 - protein, 124 aa, Artificial
  single domain antibody or Nanobody sequence
EVQLVESGGGLVQAGGSLRLSCAASGRAFSSYAMGWFRQAPGKERDFVAAITSSGSTNYADSVKGRFTISRDNAKNTVYLQMNSLKPEDTAVYYCGARVNYAAYSRLEHDYHYWGQGTQVTVSS

SEQ ID NO: 2094 - protein, 125 aa, Artificial
  single domain antibody or Nanobody sequence
EVQLVESGGGLVQAGGSLRLSCATSGRTFSTYASMGWFRQTPGKEREFVAAITSSGSTNYADSVKGRFTISRDNAKNTVYLQMNSLKPEDTAVYYCGARVNYAAYSRLEHDYHYWGQGTQVTVSS

SEQ ID NO: 2095 - protein, 116 aa, Artificial
  single domain antibody or Nanobody sequence
EVQLVESGGGLVQPGGSLRLSCAASGNIDGIITMGWYRQRPGKPREWVGTINSGGDTNYAGSVKGRFTIARDDAKNTMYLQMNGMKPEDTAVYYCKMNRAGIYEYWGQGTQVTVSS

SEQ ID NO: 2096 - protein, 123 aa, Artificial
  single domain antibody or Nanobody sequence
EVQLVESGGGLVQTGGSLRLSCAASGPTFSDYAIGWFRQAPGKEREFVAAISSSGISTIYGDSVKGRFDISRDNAKNTVYLQMNRLKPEDTAVYYCAARLFMATPNQGQYYYWGQGTQVTVSS

SEQ ID NO: 2097 - protein, 123 aa, Artificial
  single domain antibody or Nanobody sequence
EVQLVESGGGLVQAGDSLRLSCAASGFTFSNHIMGWFRQAPGKERELIAHITWNGGSTYYADSVKGRFAISRDNALNTVYLQMNSLKPEDTAVYYCAARPSYSTNNVKSYRYWGQGTQVTVSS

SEQ ID NO: 2098 - protein, 124 aa, Artificial
  single domain antibody or Nanobody sequence
EVQLVESGGGLVQAGSSLRLSCALSGRTFSDYAIGWFRQAPGKEREFVAAISGWSGGTTNYADSVKGRFTISRDNGKNTVDLRMNSLKPEDTAVYYCAARPAVVHTRKESYPYWGQGTQVTVSS

SEQ ID NO: 2099 - protein, 125 aa, Artificial
  single domain antibody or Nanobody sequence
EVQLVESGGGLVQAGGSLRLSCIASERTFSSAGVGWFRQAPGKERDFVAAISWNGVTIYYADSVKGRFTISRDNAKNTVYLQMNSLKPEDTAVYYCAARINYSVLTTTSSSYHYWGQGTQVTVSS

SEQ ID NO: 2100 - protein, 123 aa, Artificial
  single domain antibody or Nanobody sequence
EVQLVESGGGLVQPGDSLRLSCSASEGTLSRSRVAWFRQAPGKEREFVTVISGVGTSYADSVKGRFTISRDDAKNTVYLQMNSLKAEDTAIYYCAADFRSTWLSSSGSSYTYWGQGTQVTVSS

SEQ ID NO: 2101 - protein, 121 aa, Artificial
  single domain antibody or Nanobody sequence
EVQLVESGGGLVQPGGSLTLSCVGSGRRFSADVMGWYRQAPGKQREFVASISSGSAINYADSVKGRFTVSRDNAQNTVYLQMNSLKIEDTGVYYCNARRIVNVEGAYRDYWGQGTQVTVSS

SEQ ID NO: 2102 - protein, 121 aa, Artificial
  single domain antibody or Nanobody sequence
EVQLVESGGGLVQPGGSLPLSCAASGSIFRMNDMGWYRQAPGKQRERVATLTSAGNTNYADSVKGRFTISGDDARNTVYLQMNSLNPEDTAVYYCNAKVVVAVEGAKYDYWGQGTQVTVSS

SEQ ID NO: 2103 - protein, 122 aa, Artificial
  single domain antibody or Nanobody sequence
EVQLVESGGGLAQAGGSLRLSCAVFGRSRYGMAWFRRAPGKEREFVAGIAWNGASIGSADSVRGRFTISRDNSENTVYFEMGSLKPEDTAVYYCAICRISWCAGAESDYGYWGQGTQVTVSS

SEQ ID NO: 2104 - protein, 127 aa, Artificial
  single domain antibody or Nanobody sequence
EVQLVESGGGQVQAGGSLRLSCTESGRAFNTRAMGWFRQAPEKEREFVAGITMSGFNTRYADSVKGRFTISRDNAKGTVYLQMSSLKPEDTAVYYCAADSITDRRSVAVAHTSYYYWGQGTQVTVSS

SEQ ID NO: 2105 - protein, 123 aa, Artificial
  single domain antibody or Nanobody sequence
EVQLVESGGGLVQAGGSLGLSCAASGRTFSNYAMGWFRQAPGKEREFVAGISWSGGHTFYADSVKGRFTISRDNTKNTVYLQMNSMRPEDTAVYYCAARLSSVAVASTRYDYWGQGTQVTVSS

SEQ ID NO: 2106 - protein, 125 aa, Artificial
  single domain antibody or Nanobody sequence
EVQLVESGGGLVQAGDSLRLSCVASGGTFGSYAMGWFRQAPGKEREFVATIDWSGDTAFYADSVKGRFTISRDIANDVVYLQMNSLEPEDTAVYYCARNRQSGVASENLRLYTYWGQGTQVTVSS

SEQ ID NO: 2107 - protein, 123 aa, Artificial
  single domain antibody or Nanobody sequence
EVQLVESGGGLAQAGDSLRLSCVDSGSSFSAYAMGWFRQAPGKEREFVAAVSWDGRNTYYADSVKGRFTISRDNAKNTLYLQTTSLRPEDTGVYYCAEDKQSGVSVNPKYAYWGQGTQVTVSS

SEQ ID NO: 2108 - protein, 118 aa, Artificial
  single domain antibody or Nanobody sequence
EVQLVESGGGLVQAGGSLRLSCAVSGGTFESDTMAWFRQAPGKEREFVARVSWIRTTYYSDSVKGRFTISKDNAKNTVYLQMNSLKPEDTAVYYCAAQTLGRSLYDYWGQGTQVTVSS

SEQ ID NO: 2109 - protein, 126 aa, Artificial
  single domain antibody or Nanobody sequence
EVQLVESGGGLVQAGGSLRLSCAASGRTFSSNAMAWFRQAPGNERELVSAIGWSGASTYYIDSVEGRFTISRDNAKNTVYLQMNSLKPEDTAVYYCAASRYSGGVATARRSEYHYWGQGTQVTVSS

SEQ ID NO: 2110 - protein, 125 aa, Artificial
  single domain antibody or Nanobody sequence
EVQLVESGGGLVQAGDSLRLSCVASGDSFNTYTMGWFRQAPGKEREFVAAIRWSGGTTFYGDSVKGRFTISRDYAKNTWYLQMNTLKPEDTAAYYCAAVATYSRNVGSVRNYDYWGQGTQVTVSS

SEQ ID NO: 2111 - protein, 126 aa, Artificial
  single domain antibody or Nanobody sequence
EVQLVESGGGLVQAGGSLRLSCVVSEGTFSSYSMGWFRQAPGKDREFVSAITWNGTRTYYRDSVKGRFTISRDNAKNTVQLQMNSLKPEDTAVYYCAVSQPLNYYTYYDARRYDYWGQGTQVTVSS

SEQ ID NO: 2112 - protein, 124 aa, Artificial
  single domain antibody or Nanobody sequence
EAQLVESGGGLVQAGGSLRLSCTASGRTYSTTMGWFRQAPGKEREFVAAIRWSGGSAFYADSVKGRFTISRDNAKNTVYLQMTSLMPEDTAVYYCADTPVYYQRYYDQNAYDYWGQGTQVTVSS

SEQ ID NO: 2113 - protein, 118 aa, Artificial
  single domain antibody or Nanobody sequence
EVQLVESGGGLVQAGGSLRLSCAASGRAFSSYAMGWFRQAPGKERDFVAAITSSGSTNYADSVKGRFTISRDNAKNTVYLQMNSLKPEDTAVYYCAAKYYSYYAYDYWGQGTQVTVSS

SEQ ID NO: 2114 - protein, 124 aa, Artificial
  single domain antibody or Nanobody sequence
EVQLVESGGGLVQAGGSLRLSCAASGGTFSVYHMAWFRQAPGKEREFVAAIRSSGGLFYALSVSGRFTISRDNAKDTMYLQMNVLKPEDTAVYYCAASPVYYIDYSSQYKYGYWGQGTQVTVSS

SEQ ID NO: 2115 - protein, 124 aa, Artificial
  single domain antibody or Nanobody sequence
EVQLVESGGGLVQAGGSLRLSCAASGGAFGVYHMGWFRQAPGKEREFVAAIRSGGTTLYEDSVKGRFTISRDNAKNTVYLRMNSLKPEDTAVYYCATQIYYRTNYYSQNAYDYWGQGTQVTVSS

SEQ ID NO: 2116 - protein, 124 aa, Artificial
  single domain antibody or Nanobody sequence
EVQLVESGGGLVQAGGSLRLSCAASGGTFGVYHMGWFRQAPGKEREFVAVIRSGGTTLYADSVKGRFTISRDDAKNTVYLQMNSLKPEDTAVYLCAAQIYYRTNYYSQNNYDYWGQGTQVTVSS

SEQ ID NO: 2117 - protein, 124 aa, Artificial
  single domain antibody or Nanobody sequence
EVQLVESGGGLVQAGGSLELSCAASGGAFGVYHMGWFRQAPGKEREFVAAIRSGGTTLYEDSVKGRVTISRDDAKNTVYLRMNSLKPEDTAVYYCAAQIYYRTNYYSQNVYDYWGQGTQVTVSS

SEQ ID NO: 2118 - protein, 124 aa, Artificial
  single domain antibody or Nanobody sequence
EVQLVESGGGLVQAGGSLRLSCAASGGTFGVYTMAWFRQAPGKEREFVAAIRSGATTLYEDSVKGRFTISRDDAKNTVYLRMNSLKPEDTAVYYCAAQIYYRTNYYSQNEYDYWGQGTQVTVSS

SEQ ID NO: 2119 - protein, 124 aa, Artificial
  single domain antibody or Nanobody sequence
EVQLVESGGGLVQAGGSLRLSCAASGGTFGVYHMGWFRQAPGTEREFVAVIRSGGTTLYEDSVKGRFTISRDNAKNTVYLRMNSLKPEDTAVYYCAAQIYYRTNYSSQSNYDYWGQGTQVTVSS

SEQ ID NO: 2120 - protein, 124 aa, Artificial
  single domain antibody or Nanobody sequence
EVQLVESGGGLVQAGGSLKLSCAVSGRTIVPYTMAWFRQAPGKEREFVAVTRSGGTTFYADSAKGRFTIARDDAKNTVYLQMNSLKPEDTAVYYCALATAYRTNYSSRDKYDYWGQGTQVTVSS

SEQ ID NO: 2121 - protein, 122 aa, Artificial
  single domain antibody or Nanobody sequence
EVQLVESGGGLVQPGGSLRLSCAASGFTFSSYAMSWVRQAPGKGLEWVSAINSGGGSTSYADSVKGRFTISRDNAKNTLYLQMNSLKPEDTAVYYCAKYLSFYSDYEVYDYWGQGTQVTVSS

SEQ ID NO: 2122 - protein, 120 aa, Artificial
  single domain antibody or Nanobody sequence
EVQLVESGGGLVQAGGSLRLSCAASGGTFSSGVMAWFRQSPGEEREFLALITRNGETKKTADSVKGRFTISRDNAKNGVSLQMDSLKAEDTAVYYCASDPTYGSGRWTYWGQGTQVTVSS

SEQ ID NO: 2123 - protein, 128 aa, Artificial
  single domain antibody or Nanobody sequence
EVQLVESGGGLVQAGGSLRLSCAASRHTFSGYAMGWFRQAPGKEREFVAAIRWSGGITYYADSVKGRFTISSDNAKNTVYLQMNSLKPEDTALYYCARSVTYYSGSHAYTQEGGYARWGQGTQVTVSS

SEQ ID NO: 2124 - protein, 126 aa, Artificial
  single domain antibody or Nanobody sequence
EVQLVESGGGLVQTGGSLRLSCAASGRAFSTYGMGWFRQAPGKAREFVAAISRSGTGTYYAGSMKGRFTISRDDAKNTVYLQMNSLKPEDTAVYYCAARQPYASGSHYSSTQYTYWGQGTQVTVSS

SEQ ID NO: 2125 - protein, 119 aa, Artificial
  single domain antibody or Nanobody sequence
EVQLVESGGGLVQAGGSLRLSCAASGRSFNDYTMGWFRQTPGKEREFVARVWWNGGSAYYADSVKGRFTISIDNAKNTVYLQMNNLTPEDTAVYYCAALYRGRSVYDDWGQGTQVTVSS

SEQ ID NO: 2126 - protein, 127 aa, Artificial
  single domain antibody or Nanobody sequence
EVQLVESGGGLVRAGTSLRLSCADSARTFSSAAMGWFRQAPGKEREFVSAISPIGSSKYYADSVKGRFTISRDNAKNTVYLQMDSLKPEDTAVYYCAASSYGSTYYSQGRAYYYDYWGQGTQVTVSS

SEQ ID NO: 2127 - protein, 124 aa, Artificial
  single domain antibody or Nanobody sequence
EVQLVESGGGLVQPGGSLRLSCTVFGRTFSGDVIGWFRQAPGKEREFVAAISTSGGGTDSADSVKGRFTISKENAKNTVYLQMTILKPEDTAVYYCASSPYGPLYRSTHYYDYWGQGTQVTVSS

SEQ ID NO: 2128 - protein, 125 aa, Artificial
  single domain antibody or Nanobody sequence
EVQLVESGGGLVQAGGSLGLSCAASGRTVSTMGWFRQAPGKEREFVTAITWSGDSTNFADSVKGRFTISRDSAKDTVYLQMNNLKPEDTAVYYCAATTYYSGSYISTLSTSYNYWGQGTQVTVSS

SEQ ID NO: 2129 - protein, 111 aa, Artificial
  single domain antibody or Nanobody sequence
EVQLVESGGGLVQAGGSLRLSCVASGRTLSTTGVGWFRQAPGKGRESVATIFVGGTTYYSDSVKGRFTISRDNAKNAVNLQMSNLKPEDTALHYCTIGSYRGQGTQVTVSS

SEQ ID NO: 2130 - protein, 111 aa, Artificial
  single domain antibody or Nanobody sequence
EVQLVESGGGLVQAGGSLRLSCVASGRTLSTTGVGWFRQAPGKERESVATIFVGGTTYYSDSVKGRFTISRDNARNAVNPQMNNLKPEDTAVYYCTIGSYRGQGTQVTVSS

SEQ ID NO: 2131 - protein, 127 aa, Artificial
  single domain antibody or Nanobody sequence
EVQLVESGGGLVQAGGSLRLSCAASGRTFSRDVMGWFRQAPGKEREFVAAKTWSGASTYYADSVRGRFTISRDNAKNAVYLQMNSLKPEDTAVYYCAARDSSTLDSTYYVGGSYNYWGRGTQVTVSS

SEQ ID NO: 2132 - protein, 111 aa, Artificial
  single domain antibody or Nanobody sequence
EVQLVESGGGLVQAGGSLRLSCVASGRTLSTTGVGWFRQAPGKERESVATIFVGGTTYYSDSVKGRFTISRDNAKNAVNLQMSNLKPEDTALYYCTIGSYRGQGTQVTVSS

SEQ ID NO: 2133 - protein, 125 aa, Artificial
  single domain antibody or Nanobody sequence
EVQLVESGGGLVQAGGSLRLSCVRSGGYFGSYHIGWFRQAPGNEREFVAAITWNGASTSYADSVKGRFTISRSIAENTVYLQMNKVKPEDTAVYYCAARMYGSDWLPRPEDFDSWGQGTQVTVSS

SEQ ID NO: 2134 - protein, 120 aa, Artificial
  single domain antibody or Nanobody sequence
EVQLVESGGGLVQPGGSLRLSCAASGSIFSINAMGWYRPAPGKQRELVARITSTGSTNYADSVKGRFTISRDNAKNTVYLQMNSLKPEDTAVYYCNADVSPSYGSRWYGWGQGTQVTVSS

SEQ ID NO: 2135 - protein, 127 aa, Artificial
  single domain antibody or Nanobody sequence
EMQLVESGGGLVQAGGSLRLSCATSERTFSTYTMAWFRQAPGKEREFVVAIKSSDNSTSYRDSVKGRFTISRDNAKSTMYLQMNSLKPEDTAVYYCAARREYSTIYTARYPGEYVYWGQGTQVTVSS

SEQ ID NO: 2136 - protein, 116 aa, Artificial
  single domain antibody or Nanobody sequence
EVQLVESGGGLVQPGGSLRLSCAASRSIFSPNVVGWYRQAPGKQRELVAAVTSGGITNYADSVKGRFTISRDNAKNTLYLQMNSLKAEDTAVYYCNARERGIYDSWGQGTQVTVSS

SEQ ID NO: 2137 - protein, 125 aa, Artificial
  single domain antibody or Nanobody sequence
EVQLVESGGGLVQAGGSLRLSCAASGGTFSRYKMGWFRQAPGKEREFVAASRWSGGIKYHADSVKGRFTISRDDAKNSIYLQMNTLKPEDTAVYYCAADDYLGGDNWYLGPYDSWGQGTQVTVSS

SEQ ID NO: 2138 - protein, 124 aa, Artificial
  single domain antibody or Nanobody sequence
EVQLVESGGGLVQAGGSLRLSCAVSGFLFDSYAMGWFRQAPGKEREFVAAIRWSGSATDYSDSVKGRFTISRDNAKNTVYLQMNSLIPEDTAVYYCAARKTYRSLTYYGEYDSWGQGTQVTVSS

SEQ ID NO: 2139 - protein, 125 aa, Artificial
  single domain antibody or Nanobody sequence
EVQLVESGGGLVQPGGSLRLSCAASRSIRSVSVMGWYRLAPGNQRELVATITADGITNYADSVKGRFTVSRDNGRNTVYLQMNSLKPEDTAVYYCNVDRLLYYSSGYYQTSVDVWGQGTQVTVSS

SEQ ID NO: 2140 - protein, 125 aa, Artificial
  single domain antibody or Nanobody sequence
EVQLVESGGALVQPGGSLRLSCAASGSIRSINTMGWYRQAPGNQREFVAAVTEGGTTSYAASVKGRFTISRDKAKNTVLLQMDSLKPEDTAVYYCNADRFLYYSAGRYDTGSDIWGQGTQVTVSS

SEQ ID NO: 2141 - protein, 125 aa, Artificial
  single domain antibody or Nanobody sequence
EVQLVESGGALVQPGGSLRLSCAASDSIRSINIMGWYRQAPGKQREFVAAVTEDGSINYAESVKGRFTISRDKAKNALYLQMNSLKPEDMAVYYCNADRVLYYSDSRYYTGSNYWGQGTQVTVSS

SEQ ID NO: 2142 - protein, 127 aa, Artificial
  single domain antibody or Nanobody sequence
EVQLVESGGGLVQPGGSLRLSCAASGSSASINTMGWYRQAPGEQRELVAEITEGGIINYTDSVKGRFTISRDNAKNTVYLEMNNLKPEDTAVYYCNADRALYRNYSDGRYYTGYDYWGQGTQVTVSS

SEQ ID NO: 2143 - protein, 115 aa, Artificial
  single domain antibody or Nanobody sequence
EVQLVESGGGLVQPGGSLRLSCAASRNIFDFNDMGWYRQGPGKEREFVALINVGGVAKYEDSVKGRFTISRDNAENTVYLQMNNLKPEDMAVYYCNARILSRNYWGQGNQVTVSS

SEQ ID NO: 2144 - protein, 127 aa, Artificial
  single domain antibody or Nanobody sequence
EVQLVESGGGLVQAGGSLRLSCAASGGTFSGRGMGWFRQAPGKEREFVAAVSWSGGNTYYADSVKGRFTISRDNAKSTVYLQMDSLKPEDTAVYYCAASRRFYSGLYYYTDDAYEYWGQGTQVTVSS

SEQ ID NO: 2145 - protein, 127 aa, Artificial
  single domain antibody or Nanobody sequence
EVQLVESGGGLVQAGGSLSLSCAASGGTFNGRAVGWFRQAPGEEREFVTGISWSGGSTDYADSVKGRFTISRDNSKNTVSLQMNSLKPEDTAVYYCAASRRFYSGLVYYSVDAYENWGQGTQVTVSS

SEQ ID NO: 2146 - protein, 130 aa, Artificial
  single domain antibody or Nanobody sequence
EVQLVESGGGLVQAGGSLRLSCAISGRTLSGRAMGWFRQAPGKEREFREFVAATSWSGGSKYVADSVTGRFTIFRDNAENTAYLQMNSLNPEDTAVYYCAVTKRYYSIKYYSTVEDYEYWGQGTQVTVSS

SEQ ID NO: 2147 - protein, 128 aa, Artificial
  single domain antibody or Nanobody sequence
EVQLVESGGGLVQAGGSLRLSCAVSGRTFNNDHMGWFRQAPGTERELVAATGRRGGPTYYADSVKGRFTISRDNAESTVYLQMNSLKAEDTAVYYCAANRYYCSTYGCLSTPRQYDYWGQGTQVTVSS

SEQ ID NO: 2148 - protein, 120 aa, Artificial
  single domain antibody or Nanobody sequence
EVQLVESGGGLVRPGGSLRLSCATSGSDIGINAMGWYRQAPGNQRELVATITGSTGTTYADSVKGRFAISRDGAKNTVYLQMDSLKPEDTAVYYCNLRVYTGTYGGRNYWGQGTQVTVSS

SEQ ID NO: 2149 - protein, 118 aa, Artificial
  single domain antibody or Nanobody sequence
EVQLVESGGGLVQAGGSLRLSCAASGRALINYAMGWFRQAPGKEREFVSAINWSGSHTDYGDSVKGRFAISRDNAKNTVYLQMHSLKPEDTAVYHCATGYSLPAFDSWGPGTQVTVSS

SEQ ID NO: 2150 - protein, 118 aa, Artificial
  single domain antibody or Nanobody sequence
EVQLVESGGGVVQAGGSLRLSCAPSGRTFSSYVMGWVRQAPGKAREFVAGITRNSGRTRYADSVKGRFTISRDNADNTVTLQMNSLKPEDTAVYYCAGGIDLYTFHYFGQGTQVTVSS

SEQ ID NO: 2151 - protein, 118 aa, Artificial
  single domain antibody or Nanobody sequence
EVQLVESGGGLVQAGGSLRLSCAPSGRTFSSYVMGWVRQAPGKAREFVAGITRNSIRTRYADSVKGRFTISRDNADNTVTLQMNSLKPEDTAVYYCAGGIDLYTFDYFGQGTQVTVSS

SEQ ID NO: 2152 - protein, 126 aa, Artificial
  single domain antibody or Nanobody sequence
EVQLVESGGGLVQAGGSLRLSCAASGRPVNNYIMGWFRQALGQGREFVAAINRNGATAAYADSVKGRFTISRDNAEDLLYLQMNLLKPEDTAVYYCAANSDSGFDSYSVWAAYEYWGQGTQVTVSS

SEQ ID NO: 2153 - protein, 121 aa, Artificial
  single domain antibody or Nanobody sequence
EVQLVESGGGLVQAGGSLRLSCAASGRTFSAYAMGWFRQAPGKERESVATIRWTGGSSSTSYADSVKGRFTISKNTAENTVYLQMNSLKPEDTAVYYCAVLLTVWDTYKYWGQGTQVTVSS

SEQ ID NO: 2154 - protein, 123 aa, Artificial
  single domain antibody or Nanobody sequence
EVQLVESGGGLVQAGGSLRLSCAASGRTYNMAWFRQAPGKEREFVAAMNWSGGSTKYAESVKGRFTISRANDNNPLYLQMNTLKPEDTAVYYCAATNRWYTGVYDLPSRYEYWGQGTQVTVSS

SEQ ID NO: 2155 - protein, 123 aa, Artificial
  single domain antibody or Nanobody sequence
EVQLVESGGGLVQAGGSLRLSCTASGQTFNMGWFRQAPGKEREFVAAISWSQYNTKYADSVKGRFTISRDNAINSLYLQMDTLKPEDTAVYYCAATNRWFSAVYDLPSRYTYWGQGTQVTVSS

SEQ ID NO: 2156 - protein, 114 aa, Artificial
  single domain antibody or Nanobody sequence
EVQLVESGGAFVQPGGSLRLSCAASGSDVWFNVMGWYRQGPGQQLELVASITYGGNINYGDPVKGRFSISRDNALKTVYLQMNSLKPEDTAVYYCYADLPSRLWGQGTQVTVSS

SEQ ID NO: 2157 - protein, 123 aa, Artificial
  single domain antibody or Nanobody sequence
EVQLVESGGGLVQAGGSLRLSCTASGRAFNMGWFRQAPGKEREFVAGVNWGGGSTKVADSVKERFTISRDYDNSPVYLQMNTLKPEDTAVYYCAATSRWYSAVYDLPTRYDYWGQGTQVTVSS

SEQ ID NO: 2158 - protein, 124 aa, Artificial
  single domain antibody or Nanobody sequence
EVQLVESGGGLVQAGGSLRLSCQLSGGTVSDLHMGWFRQAPGKEREFVGFTRWPSITYIAEHVKGRFTISRDNAKNTVYLQMNSLEREDTAVYYCAADRSYSIDYRHPDSYSYWGQGTQVTVSS

SEQ ID NO: 2159 - protein, 123 aa, Artificial
  single domain antibody or Nanobody sequence
EVQLVESGGGLVQAGGSLRLSCAASGSIFRVNHMGWYRQAPGKQREFVAAITSDHITWYADAVKGRFTISRDNAKNTVTLQMNSLRPEDTAVYYCAADPLLFYGVGSADVDYWGQGTQVTVSS

SEQ ID NO: 2160 - protein, 117 aa, Artificial
  single domain antibody or Nanobody sequence
EVQLVESGGGLVQPGGSLRLSCAGSGNIVRDNTMAWYRQAPGNQRDLVATINVGGGTYYAGPVKGRFTISRDNAKNSVYLQMNSLKPEDTSVYYCNVISGLVQRDYWGQGTQVTVSS

SEQ ID NO: 2161 - protein, 124 aa, Artificial
  single domain antibody or Nanobody sequence
EVQLVESGGGLVQAGGSLRLSCAASGRTFSMYLMGWFRQAPGKEREFVSTINRRGGNTYYADSVKGRFTISRDNARNTVYLQMNSLKPEDTAVYYCAAGGHLLGYDVQWEPDYWGQGTQVTVSS

SEQ ID NO: 2162 - protein, 126 aa, Artificial
  single domain antibody or Nanobody sequence
EVQLVESGGGLVQAGGSLRLSCAASGRTFERYAMGWFRQAPGKEREFVATISWSGGRDTVYADSVKGRFTISRDNAKNTVYLQMNSLKPEDTAVYYCAAHKRTYELGAHSTDFGSWGQGTQVTVSS

SEQ ID NO: 2163 - protein, 126 aa, Artificial
  single domain antibody or Nanobody sequence
EVQLVESGGDLVQPGESLRLSCAVSGVTVDYSGIGWFRQAPEKEREAVSCIESGDGTTTYVDSVKGRFTISRDNAKNAVYLQMNSLKPEDTGVYYCATAVFVDSGDFSVCRGVGYWGKGTQVTVSS

SEQ ID NO: 2164 - protein, 121 aa, Artificial
  single domain antibody or Nanobody sequence
EVQLVESGGGLVQAGASLRLSCAASGRTFSRYDIGWFRQAPGKGREFVAAINWSGGTTSFGDSVKGRFTISRDNAKNTVYLQMNSLKPEDTAVYYCAALRSWPRGVDSGSWGQGTQVTVSS

SEQ ID NO: 2165 - protein, 123 aa, Artificial
  single domain antibody or Nanobody sequence
EVQLVESGGGLVQTGGSLRLSCAASGRTFSGSRMGWFRQAPGKEREFVAAIRWSGGITWYAESVKSRFTISRDNTKNTIDLQINSLKPEDTAVYYCAADVIYKNIGSGSFDYWGQGTQVTVSS

SEQ ID NO: 2166 - protein, 123 aa, Artificial
  single domain antibody or Nanobody sequence
EVQLVESGGGLVQAGGSLRLSCAASGRTFSGSRMGWLRQAPGKEREFVAAVRWSGGITWYAESVKGRFTISRDNTKNTIDLQINSLKPEDTAVYYCAADVIYKNIGSGSFDYWGQGTQVTVSS

SEQ ID NO: 2167 - protein, 123 aa, Artificial
  single domain antibody or Nanobody sequence
EVQLVESGGGLVQAGGSLRLSCAVSGLTFSSYAMGWFRQAPGKVREFVATISRSGGRTSYADSVKGRFIVSRDNAKNTADLQMNDLKPEDTAVYYCGASKWYGGFGDTDIEYWGQGTQVTVSS

SEQ ID NO: 2168 - protein, 123 aa, Artificial
  single domain antibody or Nanobody sequence
EVQLVESGGGLVQAGGSLRLSCAVSGLTFSTYAMGWFRQAPGKVREFVATISRSGGRTSYADSVKGRFIVSRDNAKNTADLQMNELKPEDTAVYYCGASKWYGGFGDTDIEYWGQGTQVTVSS

SEQ ID NO: 2169 - protein, 113 aa, Artificial
  single domain antibody or Nanobody sequence
EVQLVESGGGLVQPGGSLRLSCAASGITFRFKAMGWFRQGPGKRRELVARIAGGSTNYADSVKGRFTISRDDAKNTVFLQMNSLKPEDTAVYYCNVDGPFGNWGQGTQVTVSS

SEQ ID NO: 2170 - protein, 125 aa, Artificial
  single domain antibody or Nanobody sequence
EVQLVESGGGLVQAGGSLRLSCTASGGTFGSYALGWFRQSPGKERESVAAIDWDGSRTQYADSVKGRFTISRENVKDTMYLQMNSLQAEDTGVYYCVRSRHSGNTLSFSLKYDYWGQGTQVTVSS

SEQ ID NO: 2171 - protein, 125 aa, Artificial
  single domain antibody or Nanobody sequence
EVQLVESGGGLVQAGGSLRLSCAASEPTFSSVAMGWFRQGPGKEREFAATITWSGDSTYVTDSVKGRFTISRDNARNTAYLQMDSLRPEDTAVYSCAARRWSGTLSLFDNEYYYWGQGTQVTVSS

SEQ ID NO: 2172 - protein, 121 aa, Artificial
  single domain antibody or Nanobody sequence
EVQLVESGGGLVQAGGSLRLSCVASGRTSSYYHMAWFRQAPGKEREFIAAINLSSGSTYYPDSVKGRFTISRGNAKNTVNLQMNSLKPEDTAVYYCAADNYRDSYLEYDYWGQGTQVTVSS

SEQ ID NO: 2173 - protein, 125 aa, Artificial
  single domain antibody or Nanobody sequence
EVQLVESGGGLVQAGGSLSLSCAASGRTFSNYRMAWFRQAPRKEREFVAAISRSGESTYFADSMKGRFTISRDNTESTGYLQMNNLKPEDTAVYYCAASWDHGDYVDGGFFYDYWGQGTQVTVSS

SEQ ID NO: 2174 - protein, 124 aa, Artificial
  single domain antibody or Nanobody sequence
EVQLVESGGGLVQAGGSLRLSCAASGRTFSRYAMHWFRQAPGSERDFVAGISWDGGSTFYANSVKGRFTISRDNAKNMVYLQMNSLKPEDTAVYYCAAAGSAGPPSIDRQYDYWGQGTQVTVSS

SEQ ID NO: 2175 - protein, 118 aa, Artificial
  single domain antibody or Nanobody sequence
EVQLVESGGGLVQPGGSLRLSCAASGSSLSFNAMGWSREAPGKRRELVARIISDDSTLYADSVKGRFTISRDYAKNTAYLQMNSLKPEDTAVYYCVADVRDSIWRSYWGQGTQVTVSS

SEQ ID NO: 2176 - protein, 120 aa, Artificial
  single domain antibody or Nanobody sequence
EVQLVESGGGLVQAGGSLRLSCAASGRALSNYAMRWFRQAPGKEREFVATINWSGSHTDYADSVKGRFTISRDNAENTVYLQMNSLTPEDTAVYYCASGWGATQAQSGFWGQGTQVTVSS

SEQ ID NO: 2177 - protein, 120 aa, Artificial
  single domain antibody or Nanobody sequence
EVQLVESGGGLVQAGGSLRLSCAASGRALISFAMRWFRQAPGKEREFVAAINWSGTHTDYADSVKGRFTISRDNAENTVYLLMNSLIPEDTAVYYCATGWGATQAQHGFWGQGTQVTVSS

SEQ ID NO: 2178 - protein, 120 aa, Artificial
  single domain antibody or Nanobody sequence
EVQLVESGGGLVQAGGSLRLSCAASGRTSSGYGMGWFRQAPGKEREFVAAVGWYGSTYFADSVKGRFTIYRDNAQNTMYLQMNSLKPEDTAVYYCAASSSLATISQPSSWGQGTQVTVSS

SEQ ID NO: 2179 - protein, 118 aa, Artificial
  single domain antibody or Nanobody sequence
EVQLVESGGGLVQPGGSLRLSCAHSGRAFSLRTMGWYRQAPGNQRELVALISAGDSTYYPDSVKGRFTVSRDNAKNTVYLQMNSLKPEDTAVYYCNAKAVTSRDHEYWGQGTQVTVSS

SEQ ID NO: 2180 - protein, 128 aa, Artificial
  single domain antibody or Nanobody sequence
EVQLVESGGGLVQAGGSLRLSCAASGRTFSRYAMGWFRQAPGKEREFVAAISWTGGSSYYGDSVKGRSTISRENAENTVYLQMNSLKPEDTAVYYCAANSDEFYSGTLKLQSRMVEYWGQGTQVTVSS

SEQ ID NO: 2181 - protein, 118 aa, Artificial
  single domain antibody or Nanobody sequence
EVQLVESGGGLVQAGGSLRLSCAASGGIFSSHAISWFRQAPGKAREFVAAINWSGSHRDYADSAKGRFTISRDNAKKTAYLQMNSLRPEDTAVYYCVGGWKTDEYVKWGQGTQVTVSS

SEQ ID NO: 2182 - protein, 120 aa, Artificial
  single domain antibody or Nanobody sequence
EVQLVESGGGLVQAGGSLRLSCAASGRIFSNYAWSWFRQAPGKERGFVAAINWSGGYTDYADSVKGRFTISRDNTKNTVYLQMNSLKPEDTAVYYCRPGWVTPSYEYGNWGQGTQVTVSS

SEQ ID NO: 2183 - protein, 128 aa, Artificial
  single domain antibody or Nanobody sequence
EVQLVESGGGLVQAGGSLRLSCAASGRTFISSPMGWFRQAPGKEREVVAATTRSGGLPYYSDSVKGRFTISRDNAKNTVDLQMSSLKPEDTAAYYCAADQKYGMSYSRLWLVSEYEYWGQGTQVTVSS

SEQ ID NO: 2184 - protein, 115 aa, Artificial
  single domain antibody or Nanobody sequence
EVQLVESGGGLVQPGGSLRLSCAASGSIDSIHVVGWYRKAPGKQREVVAYIGTAGATHYADSVKGRFTISRDNAENLVYLQMNNLKPEDTAVYYCSAGWGDSAYWGQGTQVTVSS

SEQ ID NO: 2185 - protein, 123 aa, Artificial
  single domain antibody or Nanobody sequence
EVQLVESGGGLVQSGGSLRLSCVASGTIVSINATSWYRQAPGNQRELVATIIGDGRTHYADSVKDRFTISRDAAANLVYLQMNSLKPSDTAIYSCNANGIESYGWGNRHFNYWTVGTQVTVSS

SEQ ID NO: 2186 - protein, 119 aa, Artificial
  single domain antibody or Nanobody sequence
EVQLVESGGGMVQAGGSLRLSCAASGLTLSNYGMGWFRQAPGKEREFVSSINWSGTHTYDADFVKGRFIISRDNAKNTVYLQINSLKPEDTAVYYCAAGGWGTGRYNYWGQGTQVTVSS

SEQ ID NO: 2187 - protein, 122 aa, Artificial
  single domain antibody or Nanobody sequence
EVQLVESGGGLVQAGGSLRLSCAASGRTFISNYAMGWFRQAPGKEREFVATINWSGSHSDYADSVKGRFTISRDNAKNTVYLQMNNLKSEDTAVYYCAPGWGTAPLSTSVYWGQGTQVTVSS

SEQ ID NO: 2188 - protein, 123 aa, Artificial
  single domain antibody or Nanobody sequence
EVQLVESGGGLVQAGGSLRLSCVASGRTFSGYSVGWFRQSPGKEREFVGGINWSGRTYYVDSVKGRFTFSRDNAKNTVYLQMNSLKPEDTAIYLCAVDRFNTIANLPGEYDYWGQGTQVTVSS

SEQ ID NO: 2189 - protein, 135 aa, Artificial
  single domain antibody or Nanobody sequence
EVQLVESGGGLVQDGGSLRLSCAASGQLANFASYAMGWFRQAPGKAREFVAAIRGSGGSTYIADPARSTYYADFVKGRFTISRDNAKNTVYLQMNSLKPEDTAVYYCACETFNSISNLPGEYDYWGQGTQVTVSS

SEQ ID NO: 2190 - protein, 124 aa, Artificial
  single domain antibody or Nanobody sequence
KVQLVESGGGLVQAGGSLRLSCAASGRTFSNYSVGWFRQAPGKEREFVAALSKDGARTYYAASVKGRFTIYRDNAKNVVYLQMSVLNGEDTAVYYCAADHFTFMSNLPSEYDYWGQGTQVTVSS

SEQ ID NO: 2191 - protein, 124 aa, Artificial
  single domain antibody or Nanobody sequence
EVQLVESGGGLVQAGGSLTLSCVISGLTLESHAMGWFRQAPGEEREFVATIRWSGSATFYSDSVKGRFTISRDNAKNTVYLQMNSLKPEDTAVYYCAARKIYRSLSYYGDYDSWGQGTQVTVSS

SEQ ID NO: 2192 - protein, 123 aa, Artificial
  single domain antibody or Nanobody sequence
EVQLVESGGGLVQPGGSLRLSCAASGRTFSDLALGWFRRAPGKEREHVAAISSSGVTTIYADSVRGRFTISRDEAKNTVYLEMNSLKTDDTAVYYCAARLTMATPNQSQYYYWGQGTQVTVSS

SEQ ID NO: 2193 - protein, 114 aa, Artificial
  single domain antibody or Nanobody sequence
EVQLVESGGGSVQPGGSLRLSCVASGSISSTNAMGWHRQVSGKERELVAIVTDGFTNYADFAKGRFTISRDNAKTTVYLQMNSLQPEDTARYYCRYSGIGTDNWGQGIEVTVSS

SEQ ID NO: 2194 - protein, 114 aa, Artificial
  single domain antibody or Nanobody sequence
EVQLVESGGGSVQPGGSLRLSCVASGSISSVNAMGWHRQVPGKQRELVAIVTDGFTNYADFAKGRFTISRDNAKTTVYLQMNSLQPEDTARYYCRYSGIGTDNWGQGIEVTVSS

SEQ ID NO: 2195 - protein, 122 aa, Artificial
  single domain antibody or Nanobody sequence
EVQLVESGGGLVQPGGSLRLSCAASGNIKSIDVMGWHRQAPGKERELVSDISFGGNTNYANSVKGRFTISRDNAKNTVYLQMNSLKPEDTAVYYCYADILYKTDIYYRNDFWGQGTQVTVSS

SEQ ID NO: 2196 - protein, 131 aa, Artificial
  single domain antibody or Nanobody sequence
EVQLVESGGGLVQAGGSLRLSCAASGFSFADYAIGWFRQAPGKEREGVSCIANSEGTKYYADSAQGRLPISSDNAKKTVYLQMDSLKPEDTAVYYCAALPYTICPVVVKKGAVYYGVDDYWGKGTQVTVSS

SEQ ID NO: 2197 - protein, 120 aa, Artificial
  single domain antibody or Nanobody sequence
EVQLVESGGGLVQPGGSLRLSCAASGFPFGMYGMRWVRQAPGKGPERVSSINSDGDTTYYADSVKGRFTISRDNDENMLYLQMNSLKPEDTAVYYCATGFSDRSFAVTHKGQGTQVTVSS

SEQ ID NO: 2198 - protein, 124 aa, Artificial
  single domain antibody or Nanobody sequence
EVQLVESGGGLEQAGGSLRLSCAASGLTFRSAAMGWFRQGPGKEREFVAAISRDGAATYYTDSVKGRFTISRDNAKNTVFLQMNSLKPEDTAIYYCAADFRLARLRVADDYDYWGQGTQVTVSS

SEQ ID NO: 2199 - protein, 130 aa, Artificial
  single domain antibody or Nanobody sequence
EVQLVESGGGLVQAGGSLRLSCAASGFSLDDRAIAWFRQAPGKAREGVSCITPHHGGIIFTRESVKGRFATSSDSAKNTVYLQMHSLKPEDTAVYYCATLRTDYSINWANCQRDSLYGYWGQGTQVTVSS

SEQ ID NO: 2200 - protein, 119 aa, Artificial
  single domain antibody or Nanobody sequence
EMQLVESGGGLVQPGGSLRLSCAASGNIPPINAMAWYRQAPGNERELVAAVTSGGGTNYATSVKGRFIISRDDSKNTVDLQMNSLKPEDTAVYYCNLGGWTRTHPFDYWGQGTQVTVSS

SEQ ID NO: 2201 - protein, 249 aa, Artificial
  polypeptide sequence
EVQLVESGGGLVQPGGSLRLSCAASGFIFDDYAMSWVRQAPGKGLEWVSAINWSGSHRNYADSVKGRFTISRDNAKKTVYLQMNSLQSEDTAVYYCGTGWQSTTKNQGYWGQGTQVTVSSGGGGSGGGSEVQLVESGGGLVQPGGSLRLSCAASGFIFDDYAMSWVRQAPGKGLEWVSAINWSGSHRNYADSVKGRFTISRDNAKKTVYLQMNSLQSEDTAVYYCGTGWQSTTKNQGYWGQGTQVTVSS

SEQ ID NO: 2202 - protein, 257 aa, Artificial
  polypeptide sequence
EVQLVESGGGLVQPGGSLRLSCATSGFTFDDYAMTWVRQAPGKGLEWVSSINWSGTHTDYTDSVKGRFTISRNNANNTLYLQMNSLKSEDTAVYYCAKNWGDAGTTWFEKSGSAGQGTQVTVSSGGGGSGGGSEVQLVESGGGLVQPGGSLRLSCATSGFTFDDYAMTWVRQAPGKGLEWVSSINWSGTHTDYTDSVKGRFTISRNNANNTLYLQMNSLKSEDTAVYYCAKNWGDAGTTWFEKSGSAGQGTQVTVSS

SEQ ID NO: 2203 - protein, 245 aa, Artificial
  polypeptide sequence
EVQLVESGGGLVQPGGSLRLSCVASGFSLDDYGMTWVRQAPGKGLEWVSSINWSGTHTDYADSVKGRFTISRDNAKNTLFLQMNSLRSEDTAVYYCNQGWKIVPTDRTGHGTQVTVSSGGGGSGGGSEVQLVESGGGLVQPGGSLRLSCVASGFSLDDYGMTWVRQAPGKGLEWVSSINWSGTHTDYADSVKGRFTISRDNAKNTLFLQMNSLRSEDTAVYYCNQGWKIVPTDRTGHGTQVTVSS

SEQ ID NO: 2204 - protein, 257 aa, Artificial
  polypeptide sequence
EVQLVESGGSLVQPGGSLRLSCAASGFTFDDYAMSWVRQVPGKGLEWVSSINWSGTHTDYADSVKGRFTISRNNANNTLYLQMNSLKSEDTAVYYCAKNWRDAGTTWFEKSGSAGQGTQVTVSSGGGGSGGGSEVQLVESGGSLVQPGGSLRLSCAASGFTFDDYAMSWVRQVPGKGLEWVSSINWSGTHTDYADSVKGRFTISRNNANNTLYLQMNSLKSEDTAVYYCAKNWRDAGTTWFEKSGSAGQGTQVTVSS

SEQ ID NO: 2205 - protein, 245 aa, Artificial
  polypeptide sequence
EVQLVESGGGLVQAGGSLRLSCAASGITFSINTMGWYRQAPGKQRELVALISSIGDTYYADSVKGRFTISRDNAKNTVYLQMNSLKPEDTAVYYCKRFRTAAQGTDYWGQGTQVTVSSGGGGSGGGSEVQLVESGGGLVQAGGSLRLSCAASGITFSINTMGWYRQAPGKQRELVALISSIGDTYYADSVKGRFTISRDNAKNTVYLQMNSLKPEDTAVYYCKRFRTAAQGTDYWGQGTQVTVSS

SEQ ID NO: 2206 - protein, 242 aa, Artificial
  polypeptide sequence
EVQLVESGGGLVQPGGSLRLSCVASGFSLDDYGMTWVRQAPGKGLEWVSSINWSGTHTDYADSVKGRFTISRDNAKNTLFLQMNSLRSEDTAVYYCNQGWKIVPTDRTGHGTQVTVSSGGGGSGGGSEVQLVESGGGLVQPGNSLRLSCAASGFTFRSFGMSWVRQAPGKEPEWVSSISGSGSDTLYADSVKGRFTISRDNAKTTLYLQMNSLKPEDTAVYYCTIGGSLSRSSQGTQVTVSS

SEQ ID NO: 2207 - protein, 244 aa, Artificial
  polypeptide sequence
EVQLVESGGGLVQPGGSLRLSCAASGFIFDDYAMSWVRQAPGKGLEWVSAINWSGSHRNYADSVKGRFTISRDNAKKTVYLQMNSLQSEDTAVYYCGTGWQSTTKNQGYWGQGTQVTVSSGGGGSGGGSEVQLVESGGGLVQPGNSLRLSCAASGFTFRSFGMSWVRQAPGKEPEWVSSISGSGSDTLYADSVKGRFTISRDNAKTTLYLQMNSLKPEDTAVYYCTIGGSLSRSSQGTQVTVSS

SEQ ID NO: 2208 - protein, 248 aa, Artificial
  polypeptide sequence
EVQLVESGGGLVQPGGSLRLSCATSGFTFDDYAMTWVRQAPGKGLEWVSSINWSGTHTDYTDSVKGRFTISRNNANNTLYLQMNSLKSEDTAVYYCAKNWGDAGTTWFEKSGSAGQGTQVTVSSGGGGSGGGSEVQLVESGGGLVQPGNSLRLSCAASGFTFRSFGMSWVRQAPGKEPEWVSSISGSGSDTLYADSVKGRFTISRDNAKTTLYLQMNSLKPEDTAVYYCTIGGSLSRSSQGTQVTVSS

SEQ ID NO: 2209 - protein, 248 aa, Artificial
  polypeptide sequence
EVQLVESGGSLVQPGGSLRLSCAASGFTFDDYAMSWVRQVPGKGLEWVSSINWSGTHTDYADSVKGRFTISRNNANNTLYLQMNSLKSEDTAVYYCAKNWRDAGTTWFEKSGSAGQGTQVTVSSGGGGSGGGSEVQLVESGGGLVQPGNSLRLSCAASGFTFRSFGMSWVRQAPGKEPEWVSSISGSGSDTLYADSVKGRFTISRDNAKTTLYLQMNSLKPEDTAVYYCTIGGSLSRSSQGTQVTVSS

SEQ ID NO: 2210 - protein, 242 aa, Artificial
  polypeptide sequence
EVQLVESGGGLVQAGGSLRLSCAASGITFSINTMGWYRQAPGKQRELVALISSIGDTYYADSVKGRFTISRDNAKNTVYLQMNSLKPEDTAVYYCKRFRTAAQGTDYWGQGTQVTVSSGGGGSGGGSEVQLVESGGGLVQPGNSLRLSCAASGFTFRSFGMSWVRQAPGKEPEWVSSISGSGSDTLYADSVKGRFTISRDNAKTTLYLQMNSLKPEDTAVYYCTIGGSLSRSSQGTQVTVSS

SEQ ID NO: 2211 - protein, 272 aa, Artificial
  polypeptide sequence
EVQLVESGGGLVQAGGSLTLSCTASETTVRIRTMAWYRQPPGNQREWVATIGSNGFATYPDSVKGRFTISRDNAKNTVYLQMNSLKPEDTAVYYCRDINRDIWGQGSQVTVSSGGGGSGGGGSGGGGSGGGGSGGGGSGGGGSGGGGSEVQLVESGGSLVQPGGSLRLSCAASGFTFDDYAMSWVRQVPGKGLEWVSSINWSGTHTDYADSVKGRFTISRNNANNTLYLQMNSLKSEDTAVYYCAKNWRDAGTTWFEKSGSAGQGTQVTVSS

SEQ ID NO: 2212 - protein, 281 aa, Artificial
  polypeptide sequence
EVQLVESGGGLVQPGGSLRLSCAASGFTFDDYATSWVRQAPGKGPEWVSAINSGGGSTYYADSVKGRFTISRDNAKNTLYLQMNSLKPEDTAVYYCARPRGSSLYLLEYDYWGQGTQVTVSSGGGGSGGGGSGGGGSGGGGSGGGGSGGGGSGGGGSEVQLVESGGSLVQPGGSLRLSCAASGFTFDDYAMSWVRQVPGKGLEWVSSINWSGTHTDYADSVKGRFTISRNNANNTLYLQMNSLKSEDTAVYYCAKNWRDAGTTWFEKSGSAGQGTQVTVSS

SEQ ID NO: 2213 - protein, 272 aa, Artificial; identical to SEQ ID NO: 2211
  polypeptide sequence

SEQ ID NO: 2214 - protein, 274 aa, Artificial
  polypeptide sequence
EVQLVESGGGLVQAGGSLRLSCAASGIISSFRTLAWYRQAPGKQRDWVATISSAGGTAYADAVKGRFTISISRDNVEYTVDLQMDSLKPEDTAVYYCRDINGDYWGQGTQVTVSSGGGGSGGGGSGGGGSGGGGSGGGGSGGGGSGGGGSEVQLVESGGSLVQPGGSLRLSCAASGFTFDDYAMSWVRQVPGKGLEWVSSINWSGTHTDYADSVKGRFTISRNNANNTLYLQMNSLKSEDTAVYYCAKNWRDAGTTWFEKSGSAGQGTQVTVSS

SEQ ID NO: 2215 - protein, 272 aa, Artificial; identical to SEQ ID NO: 2211
  polypeptide sequence

SEQ ID NO: 2216 - protein, 272 aa, Artificial; identical to SEQ ID NO: 2211
  polypeptide sequence

SEQ ID NO: 2217 - protein, 278 aa, Artificial
  polypeptide sequence
KVQLVESGGGLVQPGGSLRLSCAASGSIFGFNDMAWYRQAPGKQRELVALISRVGVTSSADSVKGRFTISRVNAKDTVYLQMNSLKPEDTAVYYCYMDQRLDGSTLAYWGQGTQVTVSSGGGGSGGGGSGGGGSGGGGSGGGGSGGGGSGGGGSEVQLVESGGSLVQPGGSLRLSCAASGFTFDDYAMSWVRQVPGKGLEWVSSINWSGTHTDYADSVKGRFTISRNNANNTLYLQMNSLKSEDTAVYYCAKNWRDAGTTWFEKSGSAGQGTQVTVSS

SEQ ID NO: 2218 - protein, 285 aa, Artificial
  polypeptide sequence
EVQLVESGGGLVQAGGSLRLSCAASGRTFRSYPMGWFRQAPGKEREFVASITGSGGSTYYADSVKGRFTISRDNAKNTVYLQMNSLRPEDTAVYSCAAYIRPDTYLSRDYRKYDYWGQGTQVTVSSGGGGSGGGGSGGGGSGGGGSGGGGSGGGGSGGGGSEVQLVESGGSLVQPGGSLRLSCAASGFTFDDYAMSWVRQVPGKGLEWVSSINWSGTHTDYADSVKGRFTISRNNANNTLYLQMNSLKSEDTAVYYCAKNWRDAGTTWFEKSGSAGQGTQVTVSS

SEQ ID NO: 2219 - protein, 283 aa, Artificial
  polypeptide sequence
EVQLVESGGSLVQPGGSLRLSCAASGFTFDDYAMSWVRQVPGKGLEWVSSINWSGTHTDYADSVKGRFTISRNNANNTLYLQMNSLKSEDTAVYYCAKNWRDAGTTWFEKSGSAGQGTQVTVSSGGGGSGGGGSGGGGSGGGGSGGGGSGGGGSGGGGSEVQLVESGGSLVQPGGSLRLSCAASGFTFDDYAMSWVRQVPGKGLEWVSSINWSGTHTDYADSVKGRFTISRNNANNTLYLQMNSLKSEDTAVYYCAKNWRDAGTTWFEKSGSAGQGTQVTVSS

SEQ ID NO: 2220 - protein, 280 aa, Artificial
  polypeptide sequence
EVQLVESGGGLVQAGGSLRLSCAASGRTFRSYPMGWFRQAPGKEREFVASITGSGGSTYYADSVKGRFTISRDNAKNTVYLQMNSLRPEDTAVYSCAAYIRPDTYLSRDYRKYDYWGQGTQVTVSSGGGGSGGGGSGGGGSGGGGSGGGGSGGGGSGGGGSEVQLVESGGGLVQPGGSLRLSCAASGSIFGFNDMAWYRQAPGKQRELVALISRVGVTSSADSVKGRFTISRVNAKDTVYLQMNSLKPEDTAVYYCYMDQRLDGSTLAYWGQGTQVTVSS

SEQ ID NO: 2221 - protein, 272 aa, Artificial
  polypeptide sequence
EVQLVESGGGLVQAGGSLRLSCAASGITFSINTMGWYRQAPGKQRELVALISSIGDTYYADSVKGRFTISRDNAKNTVYLQMNSLKPEDTAVYYCKRFRTAAQGTDYWGQGTQVTVSSGGGGSGGGGSGGGGSGGGGSGGGGSGGGGSGGGGSEVQLVESGGGLVQPGGSLRLSCAASGSIFGFNDMAWYRQAPGKQRELVALISRVGVTSSADSVKGRFTISRVNAKDTVYLQMNSLKPEDTAVYYCYMDQRLDGSTLAYWGQGTQVTVSS

SEQ ID NO: 2222 - protein, 272 aa, Artificial
  polypeptide sequence
KVQLVESGGGLVQPGGSLRLSCAASGSIFGFNDMAWYRQAPGKQRELVALISRVGVTSSADSVKGRFTISRVNAKDTVYLQMNSLKPEDTAVYYCYMDQRLDGSTLAYWGQGTQVTVSSGGGGSGGGGSGGGGSGGGGSGGGGSGGGGSGGGGSEVQLVESGGGLVQAGGSLRLSCAASGITFSINTMGWYRQAPGKQRELVALISSIGDTYYADSVKGRFTISRDNAKNTVYLQMNSLKPEDTAVYYCKRFRTAAQGTDYWGQGTQVTVSS

SEQ ID NO: 2223 - protein, 278 aa, Artificial
  polypeptide sequence
EVQLVESGGSLVQPGGSLRLSCAASGFTFDDYAMSWVRQVPGKGLEWVSSINWSGTHTDYADSVKGRFTISRNNANNTLYLQMNSLKSEDTAVYYCAKNWRDAGTTWFEKSGSAGQGTQVTVSSGGGGSGGGGSGGGGSGGGGSGGGGSGGGGSGGGGSEVQLVESGGGLVQPGGSLRLSCAASGSIFGFNDMAWYRQAPGKQRELVALISRVGVTSSADSVKGRFTISRVNAKDTVYLQMNSLKPEDTAVYYCYMDQRLDGSTLAYWGQGTQVTVSS

SEQ ID NO: 2224 - protein, 273 aa, Artificial
  polypeptide sequence
EVQLVESGGGLVQAGGSLRLSCVVSGIPSTIRAMAWYRQAPGRQRDWVATIYSPSGSAVYADSVKGRFTISSDNAKKTIYLQMNSLKPDDTAVYYCRDVNREYWGQGTQVTVSSGGGGSGGGGSGGGGSGGGGSGGGGSGGGGSGGGGSEVQLVESGGSLVQPGGSLRLSCAASGFTFDDYAMSWVRQVPGKGLEWVSSINWSGTHTDYADSVKGRFTISRNNANNTLYLQMNSLKSEDTAVYYCAKNWRDAGTTWFEKSGSAGQGTQVTVSS

SEQ ID NO: 2225 - protein, 271 aa, Artificial
  polypeptide sequence
EVQLVESGGGLVQAGGSLNLSCVASGIPFSTRTMAWYRQPPGNERDWVATIRSGAPVYADSVKGRFTVSRDNAKNTLYLQMNSLEPEDTATYYCWDVNGDIWGQGTPVTVSSGGGGSGGGGSGGGGSGGGGSGGGGSGGGGSGGGGSEVQLVESGGSLVQPGGSLRLSCAASGFTFDDYAMSWVRQVPGKGLEWVSSINWSGTHTDYADSVKGRFTISRNNANNTLYLQMNSLKSEDTAVYYCAKNWRDAGTTWFEKSGSAGQGTQVTVSS

SEQ ID NO: 2226 - protein, 271 aa, Artificial; identical to SEQ ID NO: 2225
  polypeptide sequence

SEQ ID NO: 2227 - protein, 272 aa, Artificial
  polypeptide sequence
EVQLVESGGGLVQAGGSLRLSCVTSRRPASTRTMAWYRQAPGKQRDWVATISSHGLPVYADSVKGRFTVSRDNANNTVYLQMNTLKPEDTAVYYCRDVNADYWGQGTQVTVSSGGGGSGGGGSGGGGSGGGGSGGGGSGGGGSGGGGSEVQLVESGGSLVQPGGSLRLSCAASGFTFDDYAMSWVRQVPGKGLEWVSSINWSGTHTDYADSVKGRFTISRNNANNTLYLQMNSLKSEDTAVYYCAKNWRDAGTTWFEKSGSAGQGTQVTVSS

SEQ ID NO: 2228 - protein, 272 aa, Artificial
  polypeptide sequence
EVQLVESGGGLVQPGGSLRLSCAASRIPFSTRTMAWYRQAPGKQRDWVATIGTSGPPRYADSVKGRFTVSRDNAKNTVYLQMNSLKAEDTAVYYCWDVNADYWGQGTQVTVSSGGGGSGGGGSGGGGSGGGGSGGGGSGGGGSGGGGSEVQLVESGGSLVQPGGSLRLSCAASGFTFDDYAMSWVRQVPGKGLEWVSSINWSGTHTDYADSVKGRFTISRNNANNTLYLQMNSLKSEDTAVYYCAKNWRDAGTTWFEKSGSAGQGTQVTVSS

SEQ ID NO: 2229 - protein, 272 aa, Artificial
  polypeptide sequence
EVQLVESGGGLVQPGGSLRLSCVASRIPASIRTMAWYRQTPGNQRDWLATIGSSGTPAYADSVKGRFTVSRDNAKNTVYLQMNSLKPEDTAVYYCRDVNGDYWGQGTQVTVSSGGGGSGGGGSGGGGSGGGGSGGGGSGGGGSGGGGSEVQLVESGGSLVQPGGSLRLSCAASGFTFDDYAMSWVRQVPGKGLEWVSSINWSGTHTDYADSVKGRFTISRNNANNTLYLQMNSLKSEDTAVYYCAKNWRDAGTTWFEKSGSAGQGTQVTVSS

SEQ ID NO: 2230 - protein, 283 aa, Artificial
  polypeptide sequence
KVQLVESGGSLVPPGGSLRLSCAASGFTFDDYAMTWVRQAPGKGLEWVSSINWSGTHTDYTDSVKGRFTISRNNANNTLYLQMNSLKSEDTAVYYCAKNWGDAGTTWFEKSGSAGQGTQVTVSSGGGGSGGGGSGGGGSGGGGSGGGGSGGGGSGGGGSEVQLVESGGSLVQPGGSLRLSCAASGFTFDDYAMSWVRQVPGKGLEWVSSINWSGTHTDYADSVKGRFTISRNNANNTLYLQMNSLKSEDTAVYYCAKNWRDAGTTWFEKSGSAGQGTQVTVSS

SEQ ID NO: 2231 - protein, 271 aa, Artificial; identical to SEQ ID NO: 2225
  polypeptide sequence

SEQ ID NO: 2232 - protein, 283 aa, Artificial
  polypeptide sequence
EVQLVESGGSLVQPGGSLRLSCAASGFTFDDYAMTWVRQTPGKGLEWVSSINWSGTHTDYTDSVKGRFTISRNNANNTLYLQMNSLKSDDTAVYYCAKNWGDAGTTWFEKSGSAGPGTQVTVSSGGGGSGGGGSGGGGSGGGGSGGGGSGGGGSGGGGSEVQLVESGGSLVQPGGSLRLSCAASGFTFDDYAMSWVRQVPGKGLEWVSSINWSGTHTDYADSVKGRFTISRNNANNTLYLQMNSLKSEDTAVYYCAKNWRDAGTTWFEKSGSAGQGTQVTVSS

SEQ ID NO: 2233 - protein, 272 aa, Artificial; identical to SEQ ID NO: 2227
  polypeptide sequence

SEQ ID NO: 2234 - protein, 272 aa, Artificial; identical to SEQ ID NO: 2229
  polypeptide sequence

SEQ ID NO: 2235 - protein, 272 aa, Artificial; identical to SEQ ID NO: 2227
  polypeptide sequence

SEQ ID NO: 2236 - protein, 272 aa, Artificial; identical to SEQ ID NO: 2227
  polypeptide sequence

SEQ ID NO: 2237 - protein, 272 aa, Artificial; identical to SEQ ID NO: 2227
  polypeptide sequence

SEQ ID NO: 2238 - protein, 283 aa, Artificial
  polypeptide sequence
EVQLVESGGSLVQPGGSLRLSCAASGFTFDDYAMTWVRQASGKGLEWVSSINWSGTHTDYTDSVKGRFTISRNNANNTLYLQMNSLKSEDTAVYYCAKNWGDAGTTWFEKSGSAGQGTQVTVSSGGGGSGGGGSGGGGSGGGGSGGGGSGGGGSGGGGSEVQLVESGGSLVQPGGSLRLSCAASGFTFDDYAMSWVRQVPGKGLEWVSSINWSGTHTDYADSVKGRFTISRNNANNTLYLQMNSLKSEDTAVYYCAKNWRDAGTTWFEKSGSAGQGTQVTVSS

SEQ ID NO: 2239 - protein, 276 aa, Artificial
  polypeptide sequence
EVQLVESGGGLVQAGGSLRLSCVASKMTFMRYTMGWYRQAPGKQRDLVASIDASGGTNYADSVKGRFTISRDNAKNTVYLEMNSLKPEDTGVYYCNGRWDIVGAIWWGQGTQVTVSSGGGGSGGGGSGGGGSGGGGSGGGGSGGGGSGGGGSEVQLVESGGSLVQPGGSLRLSCAASGFTFDDYAMSWVRQVPGKGLEWVSSINWSGTHTDYADSVKGRFTISRNNANNTLYLQMNSLKSEDTAVYYCAKNWRDAGTTWFEKSGSAGQGTQVTVSS

SEQ ID NO: 2240 - protein, 287 aa, Artificial
  polypeptide sequence
EVQLVESGGGLVQAGGSLRLSCAASGFTFDDYGIGWFRQASGKEREGVSCITSSDGSTYYADSVKGRFTISSDNAKNTVYLQMNSLKPEDTAVYYCAALPFVCPSGSYSDYGDEYDYWGQGTQVTVSSGGGGSGGGGSGGGGSGGGGSGGGGSGGGGSGGGGSEVQLVESGGSLVQPGGSLRLSCAASGFTFDDYAMSWVRQVPGKGLEWVSSINWSGTHTDYADSVKGRFTISRNNANNTLYLQMNSLKSEDTAVYYCAKNWRDAGTTWFEKSGSAGQGTQVTVSS

SEQ ID NO: 2241 - protein, 272 aa, Artificial
  polypeptide sequence
EVQLVESGGGLVQAGGSLRLSCAASGIAFRIRTMAWYRQAPGKQRDWVATSDSGGTTLYADSVKGRFTVSRDNAENTVYLQMNSLKPEDTAVYYCRDVNRDYWGQGTQVTVSSGGGGSGGGGSGGGGSGGGGSGGGGSGGGGSGGGGSEVQLVESGGSLVQPGGSLRLSCAASGFTFDDYAMSWVRQVPGKGLEWVSSINWSGTHTDYADSVKGRFTISRNNANNTLYLQMNSLKSEDTAVYYCAKNWRDAGTTWFEKSGSAGQGTQVTVSS

SEQ ID NO: 2242 - protein, 272 aa, Artificial
  polypeptide sequence
EVQLVESGGGLVQAGGSLSLSCVASGRFFSTRVMAWYRQTPGKQREFVASMRGSGSTNYADSVRGRFAISRDNAKNTVYLQMNTLKPEDTAVYYCRDINEDQWGQGTQVTVSSGGGGSGGGGSGGGGSGGGGSGGGGSGGGGSGGGGSEVQLVESGGSLVQPGGSLRLSCAASGFTFDDYAMSWVRQVPGKGLEWVSSINWSGTHTDYADSVKGRFTISRNNANNTLYLQMNSLKSEDTAVYYCAKNWRDAGTTWFEKSGSAGQGTQVTVSS

SEQ ID NO: 2243 - protein, 272 aa, Artificial; identical to SEQ ID NO: 2227
  polypeptide sequence

SEQ ID NO: 2244 - protein, 271 aa, Artificial; identical to SEQ ID NO: 2225
  polypeptide sequence

SEQ ID NO: 2245 - protein, 283 aa, Artificial
  polypeptide sequence
EVQLVESGGSLVQPGGSLRLSCAASGFTFDDYAMSWVRQAPGKGLEWISSINWSGTHTDYADSVKGRFTISRNNANNTLYLQMNNLKFEDTAVYYCAKNWRDAGTTWFEKSGSAGQGTQVTVSSGGGGSGGGGSGGGGSGGGGSGGGGSGGGGSGGGGSEVQLVESGGSLVQPGGSLRLSCAASGFTFDDYAMSWVRQVPGKGLEWVSSINWSGTHTDYADSVKGRFTISRNNANNTLYLQMNSLKSEDTAVYYCAKNWRDAGTTWFEKSGSAGQGTQVTVSS

SEQ ID NO: 2246 - protein, 271 aa, Artificial
  polypeptide sequence
EVQLVESGGGLVQAGGSLRLSCVASGIPSIRAIAWYRQAPGKQRDWVATSGTGYGATYDDSVKGRFTLSRDNAKNTVYLQMNSLKPEDTAVYYCRDVNRDYWGQGTQVTVSSGGGGSGGGGSGGGGSGGGGSGGGGSGGGGSGGGGSEVQLVESGGSLVQPGGSLRLSCAASGFTFDDYAMSWVRQVPGKGLEWVSSINWSGTHTDYADSVKGRFTISRNNANNTLYLQMNSLKSEDTAVYYCAKNWRDAGTTWFEKSGSAGQGTQVTVSS

SEQ ID NO: 2247 - protein, 272 aa, Artificial
  polypeptide sequence
EVQLVESGGGLVQAGGSLRLPCAASGIAFRIRTMAWYRQAPGKQRDWVATSDSGGTTLYADSVKGRFTVSRDNAENTVYLQMNSLKPEDTAVYYCRDVNRDYWGQGTQVTVSSGGGGSGGGGSGGGGSGGGGSGGGGSGGGGSGGGGSEVQLVESGGSLVQPGGSLRLSCAASGFTFDDYAMSWVRQVPGKGLEWVSSINWSGTHTDYADSVKGRFTISRNNANNTLYLQMNSLKSEDTAVYYCAKNWRDAGTTWFEKSGSAGQGTQVTVSS

SEQ ID NO: 2248 - protein, 281 aa, Artificial
  polypeptide sequence
EVQLVESGGGLVQPGGSLRLSCAASGFTFSSYAMSWVRQAPGKGLEWVSAISSGGGSITTYADSVKGRFTISRDNAKNTLYLQMSSLKPEDTALYYCAKARSSSSYYDFGSWGQGTQVTVSSGGGGSGGGGSGGGGSGGGGSGGGGSGGGGSGGGGSEVQLVESGGSLVQPGGSLRLSCAASGFTFDDYAMSWVRQVPGKGLEWVSSINWSGTHTDYADSVKGRFTISRNNANNTLYLQMNSLKSEDTAVYYCAKNWRDAGTTWFEKSGSAGQGTQVTVSS

SEQ ID NO: 2249 - protein, 283 aa, Artificial; identical to SEQ ID NO: 2238
  polypeptide sequence

SEQ ID NO: 2250 - protein, 271 aa, Artificial; identical to SEQ ID NO: 2225
  polypeptide sequence

SEQ ID NO: 2251 - protein, 272 aa, Artificial
  polypeptide sequence
EVQLVESGGGLVQAGGSLRLSCAASGIAFRIRTMAWYRQAPGKQRDWVATSDSGGTTLYADSVKGRFTVSRDNADNTVYLQMNSLKPEDTAVYYCRDVNRDYWGQGTQVTVSSGGGGSGGGGSGGGGSGGGGSGGGGSGGGGSGGGGSEVQLVESGGSLVQPGGSLRLSCAASGFTFDDYAMSWVRQVPGKGLEWVSSINWSGTHTDYADSVKGRFTISRNNANNTLYLQMNSLKSEDTAVYYCAKNWRDAGTTWFEKSGSAGQGTQVTVSS

SEQ ID NO: 2252 - protein, 277 aa, Artificial
  polypeptide sequence
EVQLVESGGGLVQPGGSLRLSCVASGFSLDDYGMTWVRQAPGKGLEWVSSINWSGTHTDYADSVKGRFTISRDNAKNTLFLQMNSLTPEDTAVYYCNQGWKILPAERRGHGTQVTVSSGGGGSGGGGSGGGGSGGGGSGGGGSGGGGSGGGGSEVQLVESGGSLVQPGGSLRLSCAASGFTFDDYAMSWVRQVPGKGLEWVSSINWSGTHTDYADSVKGRFTISRNNANNTLYLQMNSLKSEDTAVYYCAKNWRDAGTTWFEKSGSAGQGTQVTVSS

SEQ ID NO: 2253 - protein, 274 aa, Artificial
  polypeptide sequence
EVQLVESGGGLVQPGGSLRLSCAASGLGIAFSRRTMAWYRQAPGKQRDWVATIAGDGSTVYADSMKGRFTISRDNAKNTVYLQVNSLKPEDTAVYYCWDTNGDYWGQGTQVTVSSGGGGSGGGGSGGGGSGGGGSGGGGSGGGGSGGGGSEVQLVESGGSLVQPGGSLRLSCAASGFTFDDYAMSWVRQVPGKGLEWVSSINWSGTHTDYADSVKGRFTISRNNANNTLYLQMNSLKSEDTAVYYCAKNWRDAGTTWFEKSGSAGQGTQVTVSS

SEQ ID NO: 2254 - protein, 274 aa, Artificial
  polypeptide sequence
EVQLMESGGGLVQPGGSLRLSCAASGLGIAFSRRTMAWYRQAPGKQRDWVATIAGDGSTVYADSMKGRFTISRDNAENTVYLQMNSLKPEDTAVYYCWDVNRDYWGQGTQVTVSSGGGGSGGGGSGGGGSGGGGSGGGGSGGGGSGGGGSEVQLVESGGSLVQPGGSLRLSCAASGFTFDDYAMSWVRQVPGKGLEWVSSINWSGTHTDYADSVKGRFTISRNNANNTLYLQMNSLKSEDTAVYYCAKNWRDAGTTWFEKSGSAGQGTQVTVSS

SEQ ID NO: 2255 - protein, 283 aa, Artificial
  polypeptide sequence
EVQLVESGGSLVQPGGSLRLSCAASGFTFDDYAMTWVRQASGKGLEWVSSINWSGTHTDYADSVKGRFTISRNNANNTLYLQMNSLKSEDTAVYYCAKNWGDAGTTWFEKSGSAGQGTQVTVSSGGGGSGGGGSGGGGSGGGGSGGGGSGGGGSGGGGSEVQLVESGGSLVQPGGSLRLSCAASGFTFDDYAMSWVRQVPGKGLEWVSSINWSGTHTDYADSVKGRFTISRNNANNTLYLQMNSLKSEDTAVYYCAKNWRDAGTTWFEKSGSAGQGTQVTVSS

SEQ ID NO: 2256 - protein, 277 aa, Artificial
  polypeptide sequence
EVQLVESGGGLVQPGGSLRLSCVASGFSLDDYGMTWVRQAPGKGLEWVSSINWSGTHTDYADSVKGRFTISRDNAKNTLFLQMNSLSPEDTAVYYCNQGWKILPTNRGSHGTQVTVSSGGGGSGGGGSGGGGSGGGGSGGGGSGGGGSGGGGSEVQLVESGGSLVQPGGSLRLSCAASGFTFDDYAMSWVRQVPGKGLEWVSSINWSGTHTDYADSVKGRFTISRNNANNTLYLQMNSLKSEDTAVYYCAKNWRDAGTTWFEKSGSAGQGTQVTVSS

SEQ ID NO: 2257 - protein, 277 aa, Artificial
  polypeptide sequence
EVQLVESGGGLVQPGGSLRLSCVASGFSLDDYGMTWVRQAPGKGLEWVSSINWSGTHTDYADSVKGRFTISRDNAKNTLFLQMNSLTPEDTAVYYCNQGWKIIPTDRRGHGTQVTVSSGGGGSGGGGSGGGGSGGGGSGGGGSGGGGSGGGGSEVQLVESGGSLVQPGGSLRLSCAASGFTFDDYAMSWVRQVPGKGLEWVSSINWSGTHTDYADSVKGRFTISRNNANNTLYLQMNSLKSEDTAVYYCAKNWRDAGTTWFEKSGSAGQGTQVTVSS

SEQ ID NO: 2258 - protein, 276 aa, Artificial
  polypeptide sequence
EVQLVESGGGLVQAGGSLRLSCAASGSTFSINRMAWYRQSPGKQRELVAAVDNDDNTEYSDSVAGRFTISRDNAKNAVHLQMNSLRLEDTAVYYCNAKQLPYLQNFWGQGTQVTVSSGGGGSGGGGSGGGGSGGGGSGGGGSGGGGSGGGGSEVQLVESGGSLVQPGGSLRLSCAASGFTFDDYAMSWVRQVPGKGLEWVSSINWSGTHTDYADSVKGRFTISRNNANNTLYLQMNSLKSEDTAVYYCAKNWRDAGTTWFEKSGSAGQGTQVTVSS

SEQ ID NO: 2259 - protein, 276 aa, Artificial
  polypeptide sequence
EVQLVESGGGLVQAGGSLRLSCAASGITFRRYDMGWYRQFPGKERELVATILSEGDTNYVDPVKGRFTISRDNAKNTVYLQMNDLKPEDTAVYYCNGVWRAIGRTYWGQGTQVTVSSGGGGSGGGGSGGGGSGGGGSGGGGSGGGGSGGGGSEVQLVESGGSLVQPGGSLRLSCAASGFTFDDYAMSWVRQVPGKGLEWVSSINWSGTHTDYADSVKGRFTISRNNANNTLYLQMNSLKSEDTAVYYCAKNWRDAGTTWFEKSGSAGQGTQVTVSS

SEQ ID NO: 2260 - protein, 283 aa, Artificial
  polypeptide sequence
EVQLVESGGSLVPPGGSLRLSCAASGFTFDDYAMSWVRQAPGKGLEWVSSINWSGTHTGYTDSVKGRFTISRNNANNTLYLQMNSLKSEDTAVYYCAKNWGDAGTTWFEKSGSAGQGTQVTVSSGGGGSGGGGSGGGGSGGGGSGGGGSGGGGSGGGGSEVQLVESGGSLVQPGGSLRLSCAASGFTFDDYAMSWVRQVPGKGLEWVSSINWSGTHTDYADSVKGRFTISRNNANNTLYLQMNSLKSEDTAVYYCAKNWRDAGTTWFEKSGSAGQGTQVTVSS

SEQ ID NO: 2261 - protein, 283 aa, Artificial
  polypeptide sequence
EVQLVESGGSLVQPGGSLRLSCAASGFTFDDYAMTWVRQAPGKGLEWVSSINWSGTHTDYTDSVKGRFTISRNNANNTLYLQMNSLKSEDTAVYYCAKNWGDAGTTWFEKSGSAGQGTQVTVSSGGGGSGGGGSGGGGSGGGGSGGGGSGGGGSGGGGSEVQLVESGGSLVQPGGSLRLSCAASGFTFDDYAMSWVRQVPGKGLEWVSSINWSGTHTDYADSVKGRFTISRNNANNTLYLQMNSLKSEDTAVYYCAKNWRDAGTTWFEKSGSAGQGTQVTVSS

SEQ ID NO: 2262 - protein, 283 aa, Artificial
  polypeptide sequence
EVQLVESGGSLVPPGGSLRLSCAASGFTFDDYGMSWVRQAPGKGLEWVSSINWSGTHTDYTDSVKGRFTISRNNANNTLYLQMNSLKSEDTAVYYCAKNWGDAGTTWFEKSGSAGQGTQVTVSSGGGGSGGGGSGGGGSGGGGSGGGGSGGGGSGGGGSEVQLVESGGSLVQPGGSLRLSCAASGFTFDDYAMSWVRQVPGKGLEWVSSINWSGTHTDYADSVKGRFTISRNNANNTLYLQMNSLKSEDTAVYYCAKNWRDAGTTWFEKSGSAGQGTQVTVSS

SEQ ID NO: 2263 - protein, 277 aa, Artificial; identical to SEQ ID NO: 2252
  polypeptide sequence

SEQ ID NO: 2264 - protein, 277 aa, Artificial
  polypeptide sequence
EVQLVESGGGLVQPGGSLRLSCVASGFSLDDYGMTWVRQAPGKGLEWVSSINWSGTHTDYADSVKGRFTISRDNAKNTLFLQMNNLTPEDTAVYYCNQGWKIIPTDRRGHGTQVTVSSGGGGSGGGGSGGGGSGGGGSGGGGSGGGGSGGGGSEVQLVESGGSLVQPGGSLRLSCAASGFTFDDYAMSWVRQVPGKGLEWVSSINWSGTHTDYADSVKGRFTISRNNANNTLYLQMNSLKSEDTAVYYCAKNWRDAGTTWFEKSGSAGQGTQVTVSS

SEQ ID NO: 2265 - protein, 277 aa, Artificial
  polypeptide sequence
EVQLVESGGGLVQPGGSLRLSCVGSGFSLDDYAMTWVRQAPGKGLEWVSSINWSGTHTDYADSVKGRFTISRDNAKNTLFLQMNSLSPEDTAVYYCNQGWKIRPTIPMGHGTQVTVSSGGGGSGGGGSGGGGSGGGGSGGGGSGGGGSGGGGSEVQLVESGGSLVQPGGSLRLSCAASGFTFDDYAMSWVRQVPGKGLEWVSSINWSGTHTDYADSVKGRFTISRNNANNTLYLQMNSLKSEDTAVYYCAKNWRDAGTTWFEKSGSAGQGTQVTVSS

SEQ ID NO: 2266 - protein, 115 aa, Artificial [sequence omitted]

SEQ ID NO: 2267 - DNA, 21 bp, Artificial
  oligonucleotide sequence
gcgagcacccaagtgtgcacc

SEQ ID NO: 2268 - DNA, 21 bp, Artificial
  oligonucleotide sequence
ctgctcggcggggcagccctt

SEQ ID NO: 2269 - DNA, 50 bp, Artificial
  oligonucleotide sequence
ggcgcgccgactacaaagacgatgacgacaagagcacccaagtgtgcacc

SEQ ID NO: 2270 - DNA, 51 bp, Artificial
  oligonucleotide sequence
cggctcgagctattaatgagaatggtgatggtgctcggcggggcagccctt

SEQ ID NO: 2271 - DNA, 15 bp, Artificial
  oligonucleotide sequence
tgattacgccaagct

SEQ ID NO: 2272 - DNA, 53 bp, Artificial
  oligonucleotide sequence
tgattacgccaagcttgcatgcaaattctatttcaaggagattttcaacatga

SEQ ID NO: 2273 - DNA, 54 bp, Artificial
  oligonucleotide sequence
gctggattgttattactcgcggcccagccggccatggccgacatccagatgacg

SEQ ID NO: 2274 - DNA, 50 bp, Artificial
  oligonucleotide sequence
gcgtccgtcggcgatcgcgttaccatcacatgcaaagcaagtcaggacgt

SEQ ID NO: 2275 - DNA, 50 bp, Artificial
  oligonucleotide sequence
atcaacagaagccgggcaaggctccgaaattgctcatttactccgcatca

SEQ ID NO: 2276 - DNA, 50 bp, Artificial
  oligonucleotide sequence
ttcccgtttcagcggaagcggctcgggtactgattttaccctgactatct

SEQ ID NO: 2277 - DNA, 50 bp, Artificial
  oligonucleotide sequence
ttcgccacctactattgtcagcaatactatatttacccgtatacctttgg

SEQ ID NO: 2278 - DNA, 50 bp, Artificial
  oligonucleotide sequence
attaaacgtacggtagctgcccctagcgtgtttatctttccgccttccga

SEQ ID NO: 2279 - DNA, 50 bp, Artificial
  oligonucleotide sequence
cggccagcgtcgtatgtttactgaataacttctatccgcgcgaagctaaa

SEQ ID NO: 2280 - DNA, 50 bp, Artificial
  oligonucleotide sequence
tgcactgcagtccggcaattctcaagaatccgtgacggaacaagatagca

SEQ ID NO: 2281 - DNA, 50 bp, Artificial
  oligonucleotide sequence
agctctaccctgaccttgtcaaaggcagattatgaaaaacacaaagttta

SEQ ID NO: 2282 - DNA, 45 bp, Artificial
  oligonucleotide sequence
ccatcagggactttcgagtccggttacaaagtcttttaaccgcgg

SEQ ID NO: 2283 - DNA, 53 bp, Artificial
  oligonucleotide sequence
taataacaatccagcggctgccgtaggcaataggtatttcatgttgaaaatct

SEQ ID NO: 2284 - DNA, 54 bp, Artificial
  oligonucleotide sequence
atcgccgacggacgcgctcaggctactcggagattgcgtcatctggatgtcggc

SEQ ID NO: 2285 - DNA, 50 bp, Artificial
  oligonucleotide sequence
ccggcttctgttgataccaagcaaccccgatagatacgtcctgacttgct

SEQ ID NO: 2286 - DNA, 50 bp, Artificial
  oligonucleotide sequence
ccgctgaaacgggaaggcacaccggtgtaacgatatgatgcggagtaaat

SEQ ID NO: 2287 - DNA, 50 bp, Artificial
  oligonucleotide sequence
atagtaggtggcgaagtcctctggctgcaggctagagatagtcagggtaa

SEQ ID NO: 2288 - DNA, 50 bp, Artificial
  oligonucleotide sequence
taccgtacgtttaatttccactttcgtaccctggccaaaggtatacgggt

SEQ ID NO: 2289 - DNA, 15 bp, Artificial
  oligonucleotide sequence
tcggaaggcggaaag

SEQ ID NO: 2290 - DNA, 50 bp, Artificial
  oligonucleotide sequence
atacgacgctggccgtaccacttttcagctgctcgtcggaaggcggaaag

SEQ ID NO: 2291 - DNA, 50 bp, Artificial
  oligonucleotide sequence
ccggactgcagtgcattatccactttccattggactttagcttcgcgcgg

SEQ ID NO: 2292 - DNA, 50 bp, Artificial
  oligonucleotide sequence
ggtcagggtagagctcagtgagtaagtgctatctttgctatcttgttccg

SEQ ID NO: 2293 - DNA, 45 bp, Artificial
  oligonucleotide sequence
gaaagtccctgatgggtcacttcacaggcgtaaactttgtgtttt

SEQ ID NO: 2294 - DNA, 46 bp, Artificial
  oligonucleotide sequence
aaatagaattggcgcgccttattagcactcaccgcggttaaaagac

SEQ ID NO: 2295 - DNA, 15 bp, Artificial
  oligonucleotide sequence
aaatagaattggcgc

SEQ ID NO: 2296 - DNA, 15 bp, Artificial
  oligonucleotide sequence
gtgctaataaggcgc

SEQ ID NO: 2297 - DNA, 50 bp, Artificial
  oligonucleotide sequence
gtgctaataaggcgcgccaattctatttcaaggagacagtcatagtgaaa

SEQ ID NO: 2298 - DNA, 50 bp, Artificial
  oligonucleotide sequence
tttagtggtacctttctattctcactccgaggttcagctggtggaaagcg

SEQ ID NO: 2299 - DNA, 50 bp, Artificial
  oligonucleotide sequence
ggcggttctctgcgtctgagctgcgctgcctccggtttcacgttcactga

SEQ ID NO: 2300 - DNA, 50 bp, Artificial
  oligonucleotide sequence
gccaggcgccgggtaaaggccttgaatgggtggccgacgtaaaccctaac

SEQ ID NO: 2301 - DNA, 50 bp, Artificial
  oligonucleotide sequence
ccaacgttttaagggtcgtttcaccctgagcgtagatcgctctaaaaaca

SEQ ID NO: 2302 - DNA, 50 bp, Artificial
  oligonucleotide sequence
tcgctgcgtgcagaagacaccgctgtttattactgtgcacgcaatctggg

SEQ ID NO: 2303 - DNA, 50 bp, Artificial
  oligonucleotide sequence
attggggccaaggcacgttggtcaccgtgagtagcgcaagcactaaaggt

SEQ ID NO: 2304 - DNA, 50 bp, Artificial
  oligonucleotide sequence
acctttagtgcttgcgctactcacggtgaccaacgtgccttggccccaat

SEQ ID NO: 2305 - DNA, 50 bp, Artificial
  oligonucleotide sequence
cccaagctcgaaatccacgtccggtggcaccgccgcgctgggctgtctgg

SEQ ID NO: 2306 - DNA, 50 bp, Artificial
  oligonucleotide sequence
ccggtcactgtctcctggaactcgggtgcacttacctcgggtgtacatac

SEQ ID NO: 2307 - DNA, 50 bp, Artificial
  oligonucleotide sequence
ctagcggcttgtatagcctgtcaagcgttgtgaccgtgccttcaagctct

SEQ ID NO: 2308 - DNA, 50 bp, Artificial
  oligonucleotide sequence
ttgcaatgtgaaccacaaaccgagtaacaccaaagtggataagaaagtgg

SEQ ID NO: 2309 - DNA, 50 bp, Artificial
  oligonucleotide sequence
aaaggtaccactaaaggaattgcgaataataattttttcactatgactgt

SEQ ID NO: 2310 - DNA, 50 bp, Artificial
  oligonucleotide sequence
acgcagagaaccgcctggctgcaccagcccacctccgctttccaccagct

SEQ ID NO: 2311 - DNA, 50 bp, Artificial
  oligonucleotide sequence
tttcacgttcactgattataccatggattgggttcgccaggcgccgggta

SEQ ID NO: 2312 - DNA, 50 bp, Artificial
  oligonucleotide sequence
cccttaaaacgttggttgtaaattgagccaccagagttagggtttacgtc

SEQ ID NO: 2313 - DNA, 50 bp, Artificial
  oligonucleotide sequence
ttctgcacgcagcgaattcatctgtaaatagagtgtgtttttagagcgat

SEQ ID NO: 2314 - DNA, 50 bp, Artificial
  oligonucleotide sequence
tgccttggccccaatagtcaaagtaaaaggacgggcccagattgcgtgca

SEQ ID NO: 2315 - DNA, 50 bp, Artificial
  oligonucleotide sequence
gatttcgagcttggggccagcggaaacactgacggacctttagtgcttgc

SEQ ID NO: 2316 - DNA, 15 bp, Artificial
  oligonucleotide sequence
gatttcgagcttggg

SEQ ID NO: 2317 - DNA, 50 bp, Artificial
  oligonucleotide sequence
ggagacagtgaccggttccgggaagtaatctttcaccagacagcccagcg

SEQ ID NO: 2318 - DNA, 50 bp, Artificial
  oligonucleotide sequence
tatacaagccgctagactgcaaaaccgcagggaaagtatgtacacccgag

SEQ ID NO: 2319 - DNA, 50 bp, Artificial
  oligonucleotide sequence
tggttcacattgcaaatatacgtctgggtgcccagagagcttgaaggcac

SEQ ID NO: 2320 - DNA, 47 bp, Artificial
  oligonucleotide sequence
tttttgttctgcggccgcacagctcttcggttccactttcttatcca

SEQ ID NO: 2321 - DNA, 15 bp, Artificial
  oligonucleotide sequence
tttttgttctgcggc

1. A method for obtaining a polypeptide construct directed against to one or more antigens and/or epitopes and having one or more desired characteristics, wherein said polypeptide construct essentially consists or comprises at least two single domain antibodies, said method at least comprising the steps of:
(i) selecting a template polypeptide construct directed against one or more antigens or epitopes,
(ii) producing a diversity of polypeptide constructs that are structural variants of the selected template polypeptide construct of step (i), wherein said structural variants each comprise at least two single domain antibodies, and
(iii) screening the produced diversity of polypeptide constructs of step (ii) for a polypeptide construct having said one or more desired characteristics, wherein said polypeptide construct comprises at least two single domain antibodies and is directed against one or more antigens and/or epitopes.

2. The method according to claim 1, wherein said diversity of polypeptide constructs is a library of polypeptide constructs.

3. The method according to claim 1, wherein said structural variants of step (ii) are one or more of the following:
structural variants with regard to the number and/or identity of said single domain antibodies in said polypeptide constructs, and/or,
structural variants with regard to the relative position of said single domain antibodies within the polypeptide constructs, and/or,
structural variants with regard to the amino acid residues of the CDR region(s) of one or more of said single domain antibodies in said polypeptide constructs, and/or,
structural variants with regard to the amino acid residues of the framework region(s) of one or more of said single domain antibodies in said polypeptide constructs, and/or,
structural variants with regard to the codon usage in the nucleic acid sequences encoding the polypeptide constructs.

4. The method according to claim 1, wherein said structural variants of step (ii) comprise at least two single domain antibodies that are linked via one or more peptide linkers.

5. The method according to claim 4, wherein said structural variants of step ii) are one or more of the following
structural variants with regard to the composition of said one or more peptide linkers, and/or,
structural variants with regard to the number of said one or more linkers, and/or,
structural variants with regard to the relative position of said one or more linkers in said polypeptide constructs.

6. The method according to claim 1, wherein the single domain antibodies present in said diversity of polypeptide constructs and in said polypeptide construct are all heavy chain variable domains or are all light chain variable domains.

7. The method according to claim 6, wherein the single domain antibodies present in said diversity of polypeptide constructs and in said polypeptide construct are all heavy chain variable domains.

8. The method according to claim 7, wherein the heavy chain variable domains are variable domains obtainable from heavy chain antibodies (VHH).

9. The method according to claim 1, wherein in step (iii) the produced diversity of polypeptide constructs is screened for a polypeptide construct having a suitable binding affinity or avidity, for a polypeptide construct having a suitable solubility, for a polypeptide construct having a suitable stability, for a polypeptide construct having a suitable efficacy, and/or for a polypeptide construct having a suitable potency.

10.-13. (canceled)

14. The method according to claim 1, wherein said diversity of polypeptide construct comprises at least two single domain antibodies that are directed against the same epitopes.

15. The method according to claim 1, wherein said diversity of polypeptide construct comprises at least two single domain antibodies that are directed against at least two different epitopes that are present on the same antigen.

16. The method according to claim 1, wherein said diversity of polypeptide construct comprises at least two single domain antibodies that are directed against at least two different epitopes that are present on different antigens.

17. The method according to claim 1, wherein said polypeptide construct comprises at least three single domain antibodies.

18. The method according to claim 17, wherein said three single domain antibodies are directed against the same epitope.

19. The method according to claim 17, wherein said three single domain antibodies are directed against at least three different epitopes.

20. The method according to claim 19, wherein said at least three different epitopes are present on the same antigen.

21. The method according to claim 19, wherein said at least three different epitopes are present on at least two different antigens.

22. Polypeptide construct obtainable by the method of claim 1.
